(19) United States
(12) Patent Application Publication
(10) Pub. No.: US 2015/0344901 A1
(43) Pub. Date: Dec. 3, 2015

(54) PLANTS HAVING ENHANCED YIELD-RELATED TRAITS AND A METHOD FOR MAKING THE SAME

(71) Applicant: BASF Plant Science Company GmbH, Ludwigshafen (DE)

(72) Inventors: Yves Hatzfeld, Lille (FR); Christophe Reuzeau, La Chapelle Gonaguet (FR); Ana Isabel Sanz Molinero, Madrid (ES); Steven Vandenabeele, Oudenaarde (BE); Koen Bruynseels, Wichelen (BE); Valerie Frankard, Waterloo (BE)

(21) Appl. No.: 14/829,948

(22) Filed: Aug. 19, 2015

Related U.S. Application Data
(62) Division of application No. 13/818,858, filed on Feb. 25, 2013.
(60) Provisional application No. 61/406,212, filed on Oct. 25, 2010.
(60) Provisional application No. 61/378,965, filed on Sep. 1, 2010.
(60) Provisional application No. 61/376,304, filed on Aug. 24, 2010.

(51) Int. Cl. C12N 15/82; C07K 14/415

(52) U.S. Cl. CPC C12N 15/8261; C07K 14/415; C12N 15/8273; C12N 15/8271

(57) ABSTRACT

The present invention relates generally to the field of molecular biology and concerns a method for enhancing various economically important yield-related traits in plants. More specifically, the present invention concerns a method for enhancing yield-related traits in plants by modulating expression in a plant of a nucleic acid encoding a WI12-like (WIL) polypeptide or a SAWADEE-like polypeptide or a POZ-like (Pox virus and Zn Finger) polypeptide. The present invention also concerns plants having modulated expression of a nucleic acid encoding a WIL polypeptide or a SAWADEE-like polypeptide or a POZ-like polypeptide, which plants have enhanced yield-related traits relative to control plants. The invention also provides hitherto unknown WIL-encoding nucleic acids, and constructs comprising the same, and hitherto unknown POZ-like encoding nucleic acids, and constructs comprising the same, useful in performing the methods of the invention.

### RELATED APPLICATIONS

[0001] The present application is a divisional application of U.S. patent application Ser. No. 13/818,858 filed Feb. 25, 2013, which is a national stage application (under 35 U.S.C. §371) of PCT/IB2011/053669, filed Aug. 22, 2011, which claims benefit of U.S. Provisional Application No. 61/376,304, filed Aug. 24, 2010, and U.S. Provisional Application No. 61/378,965, filed Sep. 1, 2010, and U.S. Provisional Application No. 61/406,212, filed Oct. 25, 2010. The entire contents of each of these applications are hereby incorporated by reference herein in their entirety.

### SUBMISSION OF SEQUENCE LISTING

[0002] The Sequence Listing associated with this application is filed in electronic format via EFS-Web and hereby incorporated by reference into the specification in its entirety. The name of the text file containing the Sequence Listing is Sequence_Listing_{—}074021_{—}0221_{—}01. The size of the text file is 827 KB and the text file was created on Aug. 19, 2015.

[0003] The present invention relates generally to the field of molecular biology and concerns a method for enhancing yield-related traits in plants by modulating expression in a plant of a nucleic acid encoding a WI12-Like (WIL) polypeptide or a SAWADEE-like polypeptide or a POZ-like (Pox virus and Zn Finger) polypeptide. The present invention also concerns plants having modulated expression of a nucleic acid encoding a WIL polypeptide or a SAWADEE-like polypeptide or a POZ-like polypeptide, which plants have enhanced yield-related traits relative to corresponding wild type plants or other control plants. The invention also provides constructs useful in the methods of the invention.

[0004] The ever-increasing world population and the dwindling supply of arable land available for agriculture fuels research towards increasing the efficiency of agriculture. Conventional means for crop and horticultural improvements utilise selective breeding techniques to identify plants having desirable characteristics. However, such selective breeding techniques have several drawbacks, namely that these techniques are typically labour intensive and result in plants that often contain heterogeneous genetic components that may not always result in the desirable trait being passed on from parent plants. Advances in molecular biology have allowed mankind to modify the germplasm of animals and plants. Genetic engineering of plants entails the isolation and manipulation of genetic material (typically in the form of DNA or RNA) and the subsequent introduction of that genetic material into a plant. Such technology has the capacity to deliver crops or plants having various improved economic, agronomic or horticultural traits.

[0005] A trait of particular economic interest is increased yield. Yield is normally defined as the measurable produce of economic value from a crop. This may be defined in terms of quantity and/or quality. Yield is directly dependent on several factors, for example, the number and size of the organs, plant architecture (for example, the number of branches), seed production, leaf senescence and more. Root development, nutrient uptake, stress tolerance and early vigour may also be important factors in determining yield. Optimizing the abovementioned factors may therefore contribute to increasing crop yield.

[0006] Seed yield is a particularly important trait, since the seeds of many plants are important for human and animal nutrition. Crops such as corn, rice, wheat, canola and soybean account for over half the total human caloric intake, whether through direct consumption of the seeds themselves or through consumption of meat products raised on processed seeds.

[0007] They are also a source of sugars, oils and many kinds of metabolites used in industrial processes. Seeds contain an embryo (the source of new shoots and roots) and an endosperm (the source of nutrients for embryo growth during germination and during early growth of seedlings). The development of a seed involves many genes, and requires the transfer of metabolites from the roots, leaves and stems into the growing seed. The endosperm, in particular, assimilates the metabolic precursors of carbohydrates, oils and proteins and synthesizes them into storage macromolecules to fill out the grain.

[0008] Another important trait for many crops is early vigour. Improving early vigour is an important objective of modern rice breeding programs in both temperate and tropical rice cultivars. Long roots are important for proper soil anchorage in water-seeded rice. Where rice is sown directly into flooded fields, and where plants must emerge rapidly through water, longer shoots are associated with vigour. Where drill-seeding is practiced, longer mesocotyls and coleoptiles are important for good seedling emergence. The ability to engineer early vigour into plants would be of great importance in agriculture. For example, poor early vigour has been a limitation to the introduction of maize (Zea mays L.) hybrids based on Corn Belt germplasm in the European Atlantic.

[0009] A further important trait is that of improved abiotic stress tolerance. Abiotic stress is a primary cause of crop loss worldwide, reducing average yields for most major crop plants by more than 50% (Wang et al., Planta 218, 1-14, 2003). Abiotic stresses may be caused by drought, salinity, extremes of temperature, chemical toxicity and oxidative stress. The ability to improve plant tolerance to abiotic stress would be of great economic advantage to farmers worldwide and would allow for the cultivation of crops during adverse conditions and in territories where cultivation of crops may not otherwise be possible.

[0010] Crop yield may therefore be increased by optimising one of the above-mentioned factors.

[0011] Depending on the end use, the modification of certain yield traits may be favoured over others. For example for applications such as forage or wood production, or bio-fuel resource, an increase in the vegetative parts of a plant may be desirable, and for applications such as flour, starch or oil production, an increase in seed parameters may be particularly desirable. Even amongst the seed parameters, some may be favoured over others, depending on the application. Various mechanisms may contribute to increasing seed yield, whether that is in the form of increased seed size or increased seed number.

[0012] It has now been found that various yield-related traits may be improved in plants by modulating expression in a plant of a nucleic acid encoding a WIL polypeptide or a SAWADEE-like polypeptide or a POZ-like (Pox virus and Zn Finger) polypeptide in a plant.

### BACKGROUND

[0013] WI12 like (WIL) polypeptides group proteins and polypeptides which show homology with WI12 as described in Yen et al. Plant Physiol. Vol. 127, 2001:517-528 as a wound responsive protein and WUN1 a known Solanum tuberosum wound-induced protein.

[0014] Homeobox genes encode a typical DNA-binding domain of ˜60 amino acids known as homeodomain (HD) that characterises a family of transcription factors. Mukherjee et al. (Mol. Biol. Evol. 26(12):2775-2794, 2009) have conducted a comprehensive classification of plant homeobox genes. One such class of homeobox genes was SAWADEE which are characterised by a homeodomain and a SAWADEE domain.

[0015] BTB family proteins contain a degenerate BTB (Broad complex/Tramtrack/Bric-a-brac) or POZ (Pox virus and Zinc finger) domain of approximately 120 amino acids long. The BTB/POZ domain is an evolutionarily conserved protein-protein interaction domain that is found at the N terminus of some C2H2-type zinc finger transcription factors and in some actin binding proteins having a kelch motif (Albagli et al., Cell Growth and Differentiation 6:1193-1198, 1995). This domain was further shown to mediate homo- or heteromeric dimerization (Bardwell and Treisman, Genes and Development 8:1664-1677, 1994) and shares a structural similarity to CUL1/2 interaction domains in the SKP1 and Elongin C adaptor proteins.

[0016] BTB-POZ domain proteins belong to multigene families with 3 members in S. pombe and about 80 members organized in 10 subfamilies in Arabidopsis (Gingerich et al., J Biol Chem. 280:18810-21, 2005). Subsequent yeast-2 hybrid and protein-protein interaction studies showed that CUL3 isoforms and BTB family members (but not all) can form E3 complexes. CUL-based multisubunit E3 complex was first discovered in C. elegans, S. pombe and humans. This complex includes CUL3, RBX1. In such a complex, BTB proteins might define a recognition motif for the assembly of substrate-specific RING/CUL3/BTB ubiquitin ligase complex. In both plants and yeast, CUL3 isoforms are important for embryo development, therefore, some BTB proteins might also play important role in embryo development. Furthermore, mutant analysis in plants showed that BTB proteins can be involved in a broad range of biological processes such as ethylene biosynthesis (ETO); disease resistance (NPR1), phototropism (NPH3), root phototropism (RPT2), hormone perception (ARIA) and responses (NPY1) and leaf morphology (BOP1).

### SUMMARY

[0017] Surprisingly, it has now been found that modulating expression of a nucleic acid encoding a WIL polypeptide or a SAWADEE-like polypeptide or a POZ-like polypeptide as defined herein gives plants having enhanced yield-related traits, in particular increased yield, more in particular increased seed yield, relative to control plants.

[0018] According one embodiment, there is provided a method for improving yield-related traits as provided herein in plants relative to control plants, comprising modulating expression in a plant of a nucleic acid encoding a WIL polypeptide or a SAWADEE-like polypeptide or a POZ-like polypeptide as defined herein.

[0019] The section captions and headings in this specification are for convenience and reference purpose only and should not affect in any way the meaning or interpretation of this specification.

### DEFINITIONS

[0020] The following definitions will be used throughout the present specification.

[0021] Polypeptide(s)/Protein(s)

[0022] The terms “polypeptide” and “protein” are used interchangeably herein and refer to amino acids in a polymeric form of any length, linked together by peptide bonds.

[0023] Polynucleotide(s)/Nucleic Acid(s)/Nucleic Acid Sequence(s)/Nucleotide Sequence(s)

[0024] The terms “polynucleotide(s)”, “nucleic acid sequence(s)”, “nucleotide sequence(s)”, “nucleic acid(s)”, “nucleic acid molecule” are used interchangeably herein and refer to nucleotides, either ribonucleotides or deoxyribonucleotides or a combination of both, in a polymeric unbranched form of any length.

[0025] Homologue(s)

[0026] “Homologues” of a protein encompass peptides, oligopeptides, polypeptides, proteins and enzymes having amino acid substitutions, deletions and/or insertions relative to the unmodified protein in question and having similar biological and functional activity as the unmodified protein from which they are derived.

[0027] A deletion refers to removal of one or more amino acids from a protein.

[0028] An insertion refers to one or more amino acid residues being introduced into a predetermined site in a protein. Insertions may comprise N-terminal and/or C-terminal fusions as well as intra-sequence insertions of single or multiple amino acids. Generally, insertions within the amino acid sequence will be smaller than N- or C-terminal fusions, of the order of about 1 to 10 residues. Examples of N- or C-terminal fusion proteins or peptides include the binding domain or activation domain of a transcriptional activator as used in the yeast two-hybrid system, phage coat proteins, (histidine)-6-tag, glutathione S-transferase-tag, protein A, maltose-binding protein, dihydrofolate reductase, Tag•100 epitope, c-myc epitope, FLAG®-epitope, lacZ, CMP (calmodulin-binding peptide), HA epitope, protein C epitope and VSV epitope.

[0029] A substitution refers to replacement of amino acids of the protein with other amino acids having similar properties (such as similar hydrophobicity, hydrophilicity, antigenicity, propensity to form or break α-helical structures or β-sheet structures). Amino acid substitutions are typically of single residues, but may be clustered depending upon functional constraints placed upon the polypeptide and may range from 1 to 10 amino acids; insertions will usually be of the order of about 1 to 10 amino acid residues. The amino acid substitutions are preferably conservative amino acid substitutions. Conservative substitution tables are well known in the art (see for example Creighton (1984) Proteins. W.H. Freeman and Company (Eds) and Table 1 below).

TABLE 1
Examples of conserved amino acid substitutions

| | Conservative | | |
|---|---|---|---|
| Residue | Substitutions | Residue | Conservative Substitutions |
| Ala | Ser | Leu | Ile; Val |
| Arg | Lys | Lys | Arg; Gln |
| Asn | Gln; His | Met | Leu; Ile |
| Asp | Glu | Phe | Met; Leu; Tyr |
| Gln | Asn | Ser | Thr; Gly |
| Cys | Ser | Thr | Ser; Val |
| Glu | Asp | Trp | Tyr |
| Gly | Pro | Tyr | Trp; Phe |
| His | Asn; Gln | Val | Ile; Leu |
| Ile | Leu, Val | | |

[0030] Amino acid substitutions, deletions and/or insertions may readily be made using peptide synthetic techniques well known in the art, such as solid phase peptide synthesis and the like, or by recombinant DNA manipulation. Methods for the manipulation of DNA sequences to produce substitution, insertion or deletion variants of a protein are well known in the art. For example, techniques for making substitution mutations at predetermined sites in DNA are well known to those skilled in the art and include M13 mutagenesis, T7-Gen in vitro mutagenesis (USB, Cleveland, Ohio), QuickChange Site Directed mutagenesis (Stratagene, San Diego, Calif.), PCR-mediated site-directed mutagenesis or other site-directed mutagenesis protocols.

[0031] Derivatives

[0032] “Derivatives” include peptides, oligopeptides, polypeptides which may, compared to the amino acid sequence of the naturally-occurring form of the protein, such as the protein of interest, comprise substitutions of amino acids with non-naturally occurring amino acid residues, or additions of non-naturally occurring amino acid residues. “Derivatives” of a protein also encompass peptides, oligopeptides, polypeptides which comprise naturally occurring altered (glycosylated, acylated, prenylated, phosphorylated, myristoylated, sulphated, etc.) or non-naturally altered amino acid residues compared to the amino acid sequence of a naturally-occurring form of the polypeptide. A derivative may also comprise one or more non-amino acid substituents or additions compared to the amino acid sequence from which it is derived, for example a reporter molecule or other ligand, covalently or non-covalently bound to the amino acid sequence, such as a reporter molecule which is bound to facilitate its detection, and non-naturally occurring amino acid residues relative to the amino acid sequence of a naturally-occurring protein. Furthermore, “derivatives” also include fusions of the naturally-occurring form of the protein with tagging peptides such as FLAG, HIS6 or thioredoxin (for a review of tagging peptides, see Terpe, Appl. Microbiol. Biotechnol. 60, 523-533, 2003).

[0033] Orthologue(s)/Paralogue(s)

[0034] Orthologues and paralogues encompass evolutionary concepts used to describe the ancestral relationships of genes. Paralogues are genes within the same species that have originated through duplication of an ancestral gene; orthologues are genes from different organisms that have originated through speciation, and are also derived from a common ancestral gene.

[0035] Domain, Motif/Consensus Sequence/Signature

[0036] The term “domain” refers to a set of amino acids conserved at specific positions along an alignment of sequences of evolutionarily related proteins. While amino acids at other positions can vary between homologues, amino acids that are highly conserved at specific positions indicate amino acids that are likely essential in the structure, stability or function of a protein. Identified by their high degree of conservation in aligned sequences of a family of protein homologues, they can be used as identifiers to determine if any polypeptide in question belongs to a previously identified polypeptide family.

[0037] The term “motif” or “consensus sequence” or “signature” refers to a short conserved region in the sequence of evolutionarily related proteins. Motifs are frequently highly conserved parts of domains, but may also include only part of the domain, or be located outside of conserved domain (if all of the amino acids of the motif fall outside of a defined domain).

[0038] Specialist databases exist for the identification of domains, for example, SMART (Schultz et al. (1998) Proc. Natl. Acad. Sci. USA 95, 5857-5864; Letunic et al. (2002) Nucleic Acids Res 30, 242-244), InterPro (Mulder et al., (2003) Nucl. Acids. Res. 31, 315-318), Prosite (Bucher and Bairoch (1994), A generalized profile syntax for biomolecular sequences motifs and its function in automatic sequence interpretation. (In) ISMB-94; Proceedings 2nd International Conference on Intelligent Systems for Molecular Biology. Altman R., Brutlag D., Karp P., Lathrop R., Searls D., Eds., pp 53-61, AAAI Press, Menlo Park; Hulo et al., Nucl. Acids. Res. 32:D134-D137, (2004)), or Pfam (Bateman et al., Nucleic Acids Research 30(1): 276-280 (2002)). A set of tools for in silico analysis of protein sequences is available on the ExPASy proteomics server (Swiss Institute of Bioinformatics (Gasteiger et al., ExPASy: the proteomics server for in-depth protein knowledge and analysis, Nucleic Acids Res. 31:3784-3788(2003)). Domains or motifs may also be identified using routine techniques, such as by sequence alignment.

[0039] Methods for the alignment of sequences for comparison are well known in the art, such methods include GAP, BESTFIT, BLAST, FASTA and TFASTA. GAP uses the algorithm of Needleman and Wunsch ((1970) J Mol Biol 48: 443-453) to find the global (i.e. spanning the complete sequences) alignment of two sequences that maximizes the number of matches and minimizes the number of gaps. The BLAST algorithm (Altschul et al. (1990) J Mol Biol 215: 403-10) calculates percent sequence identity and performs a statistical analysis of the similarity between the two sequences. The software for performing BLAST analysis is publicly available through the National Centre for Biotechnology Information (NCBI). Homologues may readily be identified using, for example, the ClustalW multiple sequence alignment algorithm (version 1.83), with the default pairwise alignment parameters, and a scoring method in percentage. Global percentages of similarity and identity may also be determined using one of the methods available in the MatGAT software package (Campanella et al., BMC Bioinformatics. 2003 Jul. 10; 4:29. MatGAT: an application that generates similarity/identity matrices using protein or DNA sequences.). Minor manual editing may be performed to optimise alignment between conserved motifs, as would be apparent to a person skilled in the art. Furthermore, instead of using full-length sequences for the identification of homologues, specific domains may also be used. The sequence identity values may be determined over the entire nucleic acid or amino acid sequence or over selected domains or conserved motif(s), using the programs mentioned above using the default parameters. For local alignments, the Smith-Waterman algorithm is particularly useful (Smith T F, Waterman M S (1981) J. Mol. Biol 147(1); 195-7).

[0040] Reciprocal BLAST

[0041] Typically, this involves a first BLAST involving BLASTing a query sequence (for example using any of the sequences listed in the Tables of the Examples section) against any sequence database, such as the publicly available NCBI database. BLASTN or TBLASTX (using standard default values) are generally used when starting from a nucleotide sequence, and BLASTP or TBLASTN (using standard default values) when starting from a protein sequence. The BLAST results may optionally be filtered. The full-length sequences of either the filtered results or non-filtered results are then BLASTed back (second BLAST) against sequences from the organism from which the query sequence is derived. The results of the first and second BLASTs are then compared. A paralogue is identified if a high-ranking hit from the first blast is from the same species as from which the query sequence is derived, a BLAST back then ideally results in the query sequence amongst the highest hits; an orthologue is identified if a high-ranking hit in the first BLAST is not from the same species as from which the query sequence is derived, and preferably results upon BLAST back in the query sequence being among the highest hits.

[0042] High-ranking hits are those having a low E-value. The lower the E-value, the more significant the score (or in other words the lower the chance that the hit was found by chance). Computation of the E-value is well known in the art. In addition to E-values, comparisons are also scored by percentage identity. Percentage identity refers to the number of identical nucleotides (or amino acids) between the two compared nucleic acid (or polypeptide) sequences over a particular length. In the case of large families, ClustalW may be used, followed by a neighbour joining tree, to help visualize clustering of related genes and to identify orthologues and paralogues.

[0043] Hybridisation

[0044] The term “hybridisation” as defined herein is a process wherein substantially homologous complementary nucleotide sequences anneal to each other. The hybridisation process can occur entirely in solution, i.e. both complementary nucleic acids are in solution. The hybridisation process can also occur with one of the complementary nucleic acids immobilised to a matrix such as magnetic beads, Sepharose beads or any other resin. The hybridisation process can furthermore occur with one of the complementary nucleic acids immobilised to a solid support such as a nitro-cellulose or nylon membrane or immobilised by e.g. photolithography to, for example, a siliceous glass support (the latter known as nucleic acid arrays or microarrays or as nucleic acid chips). In order to allow hybridisation to occur, the nucleic acid molecules are generally thermally or chemically denatured to melt a double strand into two single strands and/or to remove hairpins or other secondary structures from single stranded nucleic acids.

[0045] The term “stringency” refers to the conditions under which a hybridisation takes place. The stringency of hybridisation is influenced by conditions such as temperature, salt concentration, ionic strength and hybridisation buffer composition. Generally, low stringency conditions are selected to be about 30° C. lower than the thermal melting point (Tm) for the specific sequence at a defined ionic strength and pH. Medium stringency conditions are when the temperature is 20° C. below Tm, and high stringency conditions are when the temperature is 10° C. below Tm. High stringency hybridisation conditions are typically used for isolating hybridising sequences that have high sequence similarity to the target nucleic acid sequence. However, nucleic acids may deviate in sequence and still encode a substantially identical polypeptide, due to the degeneracy of the genetic code. Therefore medium stringency hybridisation conditions may sometimes be needed to identify such nucleic acid molecules.

[0046] The Tm is the temperature under defined ionic strength and pH, at which 50% of the target sequence hybridises to a perfectly matched probe. The Tm is dependent upon the solution conditions and the base composition and length of the probe. For example, longer sequences hybridise specifically at higher temperatures. The maximum rate of hybridisation is obtained from about 16° C. up to 32° C. below Tm. The presence of monovalent cations in the hybridisation solution reduce the electrostatic repulsion between the two nucleic acid strands thereby promoting hybrid formation; this effect is visible for sodium concentrations of up to 0.4M (for higher concentrations, this effect may be ignored). Formamide reduces the melting temperature of DNA-DNA and DNA-RNA duplexes with 0.6 to 0.7° C. for each percent formamide, and addition of 50% formamide allows hybridisation to be performed at 30 to 45° C., though the rate of hybridisation will be lowered. Base pair mismatches reduce the hybridisation rate and the thermal stability of the duplexes. On average and for large probes, the Tm decreases about 1° C. per % base mismatch. The Tm may be calculated using the following equations, depending on the types of hybrids:

[0047] 1) DNA-DNA hybrids (Meinkoth and Wahl, Anal. Biochem., 138: 267-284, 1984):
[0048] Tm=81.5° C.+16.6×log 10[Na+]a+0.41x %[G/Cb]−500×[Lc]−1−0.61x % formamide

[0049] 2) DNA-RNA or RNA-RNA hybrids:
[0050] Tm=79.8° C.+18.5 (log 10[Na+]a)+0.58 (% G/Cb)+11.8 (% G/Cb)2−820/Lc

[0051] 3) oligo-DNA or oligo-RNAd hybrids:
[0052] For <20 nucleotides: Tm=2 (In)
[0053] For 20-35 nucleotides: Tm=22+1.46 (In)

[0054] a or for other monovalent cation, but only accurate in the 0.01-0.4 M range.

[0055] b only accurate for % GC in the 30% to 75% range.

[0056] c L=length of duplex in base pairs.

[0057] d oligo, oligonucleotide; In, =effective length of primer=2×(no. of G/C)+(no. of NT).

[0058] Non-specific binding may be controlled using any one of a number of known techniques such as, for example, blocking the membrane with protein containing solutions, additions of heterologous RNA, DNA, and SDS to the hybridisation buffer, and treatment with Rnase. For non-homologous probes, a series of hybridizations may be performed by varying one of (i) progressively lowering the annealing temperature (for example from 68° C. to 42° C.) or (ii) progressively lowering the formamide concentration (for example from 50% to 0%). The skilled artisan is aware of various parameters which may be altered during hybridisation and which will either maintain or change the stringency conditions.

[0059] Besides the hybridisation conditions, specificity of hybridisation typically also depends on the function of post-hybridisation washes. To remove background resulting from non-specific hybridisation, samples are washed with dilute salt solutions. Critical factors of such washes include the ionic strength and temperature of the final wash solution: the lower the salt concentration and the higher the wash temperature, the higher the stringency of the wash. Wash conditions are typically performed at or below hybridisation stringency. A positive hybridisation gives a signal that is at least twice of that of the background. Generally, suitable stringent conditions for nucleic acid hybridisation assays or gene amplification detection procedures are as set forth above. More or less stringent conditions may also be selected. The skilled artisan is aware of various parameters which may be altered during washing and which will either maintain or change the stringency conditions.

[0060] For example, typical high stringency hybridisation conditions for DNA hybrids longer than 50 nucleotides encompass hybridisation at 65° C. in 1×SSC or at 42° C. in 1×SSC and 50% formamide, followed by washing at 65° C. in 0.3×SSC. Examples of medium stringency hybridisation conditions for DNA hybrids longer than 50 nucleotides encompass hybridisation at 50° C. in 4×SSC or at 40° C. in 6×SSC and 50% formamide, followed by washing at 50° C. in 2×SSC. The length of the hybrid is the anticipated length for the hybridising nucleic acid. When nucleic acids of known sequence are hybridised, the hybrid length may be determined by aligning the sequences and identifying the conserved regions described herein. 1×SSC is 0.15M NaCl and 15 mM sodium citrate; the hybridisation solution and wash solutions may additionally include 5×Denhardt's reagent, 0.5-1.0% SDS, 100 μg/ml denatured, fragmented salmon sperm DNA, 0.5% sodium pyrophosphate.

[0061] For the purposes of defining the level of stringency, reference can be made to Sambrook et al. (2001) Molecular Cloning: a laboratory manual, 3rd Edition, Cold Spring Harbor Laboratory Press, CSH, New York or to Current Protocols in Molecular Biology, John Wiley & Sons, N.Y. (1989 and yearly updates).

[0062] Splice Variant

[0063] The term “splice variant” as used herein encompasses variants of a nucleic acid sequence in which selected introns and/or exons have been excised, replaced, displaced or added, or in which introns have been shortened or lengthened. Such variants will be ones in which the biological activity of the protein is substantially retained; this may be achieved by selectively retaining functional segments of the protein. Such splice variants may be found in nature or may be manmade. Methods for predicting and isolating such splice variants are well known in the art (see for example Foissac and Schiex (2005) BMC Bioinformatics 6: 25).

[0064] Allelic Variant

[0065] Alleles or allelic variants are alternative forms of a given gene, located at the same chromosomal position. Allelic variants encompass Single Nucleotide Polymorphisms (SNPs), as well as Small Insertion/Deletion Polymorphisms (INDELs). The size of INDELs is usually less than 100 bp. SNPs and INDELs form the largest set of sequence variants in naturally occurring polymorphic strains of most organisms.

[0066] Endogenous Gene

[0067] Reference herein to an “endogenous” gene not only refers to the gene in question as found in a plant in its natural form (i.e., without there being any human intervention), but also refers to that same gene (or a substantially homologous nucleic acid/gene) in an isolated form subsequently (re)introduced into a plant (a transgene). For example, a transgenic plant containing such a transgene may encounter a substantial reduction of the transgene expression and/or substantial reduction of expression of the endogenous gene. The isolated gene may be isolated from an organism or may be manmade, for example by chemical synthesis.

[0068] Gene Shuffling/Directed Evolution

[0069] Gene shuffling or directed evolution consists of iterations of DNA shuffling followed by appropriate screening and/or selection to generate variants of nucleic acids or portions thereof encoding proteins having a modified biological activity (Castle et al., (2004) Science 304(5674): 1151-4; U.S. Pat. Nos. 5,811,238 and 6,395,547).

[0070] Construct

[0071] Additional regulatory elements may include transcriptional as well as translational enhancers. Those skilled in the art will be aware of terminator and enhancer sequences that may be suitable for use in performing the invention. An intron sequence may also be added to the 5′ untranslated region (UTR) or in the coding sequence to increase the amount of the mature message that accumulates in the cytosol, as described in the definitions section. Other control sequences (besides promoter, enhancer, silencer, intron sequences, 3′UTR and/or 5′UTR regions) may be protein and/or RNA stabilizing elements. Such sequences would be known or may readily be obtained by a person skilled in the art.

[0072] The genetic constructs of the invention may further include an origin of replication sequence that is required for maintenance and/or replication in a specific cell type. One example is when a genetic construct is required to be maintained in a bacterial cell as an episomal genetic element (e.g. plasmid or cosmid molecule). Preferred origins of replication include, but are not limited to, the fl-ori and colE1.

[0073] For the detection of the successful transfer of the nucleic acid sequences as used in the methods of the invention and/or selection of transgenic plants comprising these nucleic acids, it is advantageous to use marker genes (or reporter genes). Therefore, the genetic construct may optionally comprise a selectable marker gene. Selectable markers are described in more detail in the “definitions” section herein. The marker genes may be removed or excised from the transgenic cell once they are no longer needed. Techniques for marker removal are known in the art, useful techniques are described above in the definitions section.

[0074] Regulatory Element/Control Sequence/Promoter

[0075] The terms “regulatory element”, “control sequence” and “promoter” are all used interchangeably herein and are to be taken in a broad context to refer to regulatory nucleic acid sequences capable of effecting expression of the sequences to which they are ligated. The term “promoter” typically refers to a nucleic acid control sequence located upstream from the transcriptional start of a gene and which is involved in recognising and binding of RNA polymerase and other proteins, thereby directing transcription of an operably linked nucleic acid. Encompassed by the aforementioned terms are transcriptional regulatory sequences derived from a classical eukaryotic genomic gene (including the TATA box which is required for accurate transcription initiation, with or without a CCAAT box sequence) and additional regulatory elements (i.e. upstream activating sequences, enhancers and silencers) which alter gene expression in response to developmental and/or external stimuli, or in a tissue-specific manner. Also included within the term is a transcriptional regulatory sequence of a classical prokaryotic gene, in which case it may include a −35 box sequence and/or −10 box transcriptional regulatory sequences. The term “regulatory element” also encompasses a synthetic fusion molecule or derivative that confers, activates or enhances expression of a nucleic acid molecule in a cell, tissue or organ.

[0076] A “plant promoter” comprises regulatory elements, which mediate the expression of a coding sequence segment in plant cells. Accordingly, a plant promoter need not be of plant origin, but may originate from viruses or micro-organisms, for example from viruses which attack plant cells. The “plant promoter” can also originate from a plant cell, e.g. from the plant which is transformed with the nucleic acid sequence to be expressed in the inventive process and described herein. This also applies to other “plant” regulatory signals, such as “plant” terminators. The promoters upstream of the nucleotide sequences useful in the methods of the present invention can be modified by one or more nucleotide substitution(s), insertion(s) and/or deletion(s) without interfering with the functionality or activity of either the promoters, the open reading frame (ORF) or the 3′-regulatory region such as terminators or other 3′ regulatory regions which are located away from the ORF. It is furthermore possible that the activity of the promoters is increased by modification of their sequence, or that they are replaced completely by more active promoters, even promoters from heterologous organisms. For expression in plants, the nucleic acid molecule must, as described above, be linked operably to or comprise a suitable promoter which expresses the gene at the right point in time and with the required spatial expression pattern.

[0077] For the identification of functionally equivalent promoters, the promoter strength and/or expression pattern of a candidate promoter may be analysed for example by operably linking the promoter to a reporter gene and assaying the expression level and pattern of the reporter gene in various tissues of the plant. Suitable well-known reporter genes include for example beta-glucuronidase or beta-galactosidase. The promoter activity is assayed by measuring the enzymatic activity of the beta-glucuronidase or beta-galactosidase. The promoter strength and/or expression pattern may then be compared to that of a reference promoter (such as the one used in the methods of the present invention). Alternatively, promoter strength may be assayed by quantifying mRNA levels or by comparing mRNA levels of the nucleic acid used in the methods of the present invention, with mRNA levels of housekeeping genes such as 18S rRNA, using methods known in the art, such as Northern blotting with densitometric analysis of autoradiograms, quantitative real-time PCR or RT-PCR (Heid et al., 1996 Genome Methods 6: 986-994). Generally by “weak promoter” is intended a promoter that drives expression of a coding sequence at a low level. By “low level” is intended at levels of about 1/10,000 transcripts to about 1/100,000 transcripts, to about 1/500,0000 transcripts per cell. Conversely, a “strong promoter” drives expression of a coding sequence at high level, or at about 1/10 transcripts to about 1/100 transcripts to about 1/1000 transcripts per cell. Generally, by “medium strength promoter” is intended a promoter that drives expression of a coding sequence at a lower level than a strong promoter, in particular at a level that is in all instances below that obtained when under the control of a 35S CaMV promoter.

[0078] Operably Linked

[0079] The term “operably linked” as used herein refers to a functional linkage between the promoter sequence and the gene of interest, such that the promoter sequence is able to initiate transcription of the gene of interest.

[0080] Constitutive Promoter

[0081] A “constitutive promoter” refers to a promoter that is transcriptionally active during most, but not necessarily all, phases of growth and development and under most environmental conditions, in at least one cell, tissue or organ. Table 2a below gives examples of constitutive promoters.

TABLE 2a
Examples of constitutive promoters

| Gene Source | Reference |
|---|---|
| Actin | McElroy et al, Plant Cell, 2: 163-171, 1990 |
| HMGP | WO 2004/070039 |
| CAMV 35S | Odell et al, Nature, 313: 810-812, 1985 |
| CaMV 19S | Nilsson et al., Physiol. Plant. 100: 456-462, 1997 |
| GOS2 | de Pater et al, Plant J Nov; 2(6): 837-44, 1992, WO |
| | 2004/065596 |
| Ubiquitin | Christensen et al, Plant Mol. Biol. 18: 675-689, |
| | 1992 |
| Rice cyclophilin | Buchholz et al, Plant Mol Biol. 25(5): 837-43, 1994 |
| Maize H3 histone | Lepetit et al, Mol. Gen. Genet. 231: 276-285, 1992 |
| Alfalfa H3 histone | Wu et al. Plant Mol. Biol. 11: 641-649, 1988 |
| Actin 2 | An et al, Plant J. 10(1); 107-121, 1996 |
| 34S FMV | Sanger et al., Plant. Mol. Biol., 14, 1990: 433-443 |
| Rubisco small | U.S. Pat. No. 4,962,028 |
| subunit | |
| OCS | Leisner (1988) Proc Natl Acad Sci USA 85(5): 2553 |
| SAD1 | Jain et al., Crop Science, 39 (6), 1999: 1696 |
| SAD2 | Jain et al., Crop Science, 39 (6), 1999: 1696 |
| nos | Shaw et al. (1984) Nucleic Acids Res. 12(20): |
| | 7831-7846 |
| V-ATPase | WO 01/14572 |
| Super promoter | WO 95/14098 |
| G-box proteins | WO 94/12015 |

[0082] Ubiquitous Promoter

[0083] A ubiquitous promoter is active in substantially all tissues or cells of an organism.

[0084] Developmentally-Regulated Promoter

[0085] A developmentally-regulated promoter is active during certain developmental stages or in parts of the plant that undergo developmental changes.

[0086] Inducible Promoter

[0087] An inducible promoter has induced or increased transcription initiation in response to a chemical (for a review see Gatz 1997, Annu. Rev. Plant Physiol. Plant Mol. Biol., 48:89-108), environmental or physical stimulus, or may be “stress-inducible”, i.e. activated when a plant is exposed to various stress conditions, or a “pathogen-inducible” i.e. activated when a plant is exposed to exposure to various pathogens.

[0088] Organ-Specific/Tissue-Specific Promoter

[0089] An organ-specific or tissue-specific promoter is one that is capable of preferentially initiating transcription in certain organs or tissues, such as the leaves, roots, seed tissue etc. For example, a “root-specific promoter” is a promoter that is transcriptionally active predominantly in plant roots, substantially to the exclusion of any other parts of a plant, whilst still allowing for any leaky expression in these other plant parts. Promoters able to initiate transcription in certain cells only are referred to herein as “cell-specific”.

[0090] Examples of root-specific promoters are listed in Table 2b below:

TABLE 2b
Examples of root-specific promoters

| Gene Source | Reference |
|---|---|
| RCc3 | Plant Mol Biol. 1995 Jan; 27(2): 237-48 |
| Arabidopsis PHT1 | Koyama et al. J Biosci Bioeng. 2005 Jan; 99(1): |
| | 38-42.; Mudge et al. (2002, Plant J. 31: 341) |
| Medicago phosphate | Xiao et al., 2006, Plant Biol (Stuttg). 2006 Jul; |
| transporter | 8(4): 439-49 |
| Arabidopsis Pyk10 | Nitz et al. (2001) Plant Sci 161(2): 337-346 |
| root-expressible genes | Tingey et al., EMBO J. 6: 1, 1987. |
| tobacco | Van der Zaal et al., Plant Mol. Biol. 16, 983, |
| auxin-inducible | 1991. |
| gene | |
| β-tubulin | Oppenheimer, et al., Gene 63: 87, 1988. |
| tobacco root-specific | Conkling, et al., Plant Physiol. 93: 1203, 1990. |
| genes | |
| B. napus G1-3b gene | U.S. Pat. No. 5,401,836 |
| SbPRP1 | Suzuki et al., Plant Mol. Biol. 21: 109-119, 1993. |
| LRX1 | Baumberger et al. 2001, Genes & Dev. 15: 1128 |
| BTG-26 Brassica | US 20050044585 |
| napus | |
| LeAMT1 (tomato) | Lauter et al. (1996, PNAS 3: 8139) |
| The LeNRT1-1 | Lauter et al. (1996, PNAS 3: 8139) |
| (tomato) | |
| class I patatin gene | Liu et al., Plant Mol. Biol. 17 (6): 1139-1154 |
| (potato) | |
| KDC1 (Daucus carota) | Downey et al. (2000, J. Biol. Chem. 275: 39420) |
| TobRB7 gene | W Song (1997) PhD Thesis, North Carolina State |
| | University, Raleigh, NC USA |
| OsRAB5a (rice) | Wang et al. 2002, Plant Sci. 163: 273 |
| ALF5 (Arabidopsis) | Diener et al. (2001, Plant Cell 13: 1625) |
| NRT2; 1Np (N. | Quesada et al. (1997, Plant Mol. Biol. 34: 265) |
| plumbaginifolia) | |

[0091] A seed-specific promoter is transcriptionally active predominantly in seed tissue, but not necessarily exclusively in seed tissue (in cases of leaky expression). The seed-specific promoter may be active during seed development and/or during germination. The seed specific promoter may be endosperm/aleurone/embryo specific. Examples of seed-specific promoters (endosperm/aleurone/embryo specific) are shown in Table 2c to Table 2f below. Further examples of seed-specific promoters are given in Qing Qu and Takaiwa (Plant Biotechnol. J. 2, 113-125, 2004), which disclosure is incorporated by reference herein as if fully set forth.

TABLE 2c
Examples of seed-specific promoters

| Gene source | Reference |
|---|---|
| seed-specific genes | Simon et al., Plant Mol. Biol. 5: 191, 1985; |
| | Scofield et al., J. Biol. Chem. 262: 12202, 1987.; |
| | Baszczynski et al., Plant Mol. Biol. 14: 633, 1990. |
| Brazil Nut albumin | Pearson et al., Plant Mol. Biol. 18: 235-245, 1992. |
| legumin | Ellis et al., Plant Mol. Biol. 10: 203-214, 1988. |
| glutelin (rice) | Takaiwa et al., Mol. Gen. Genet. 208: 15-22, 1986; |
| | Takaiwa et al., FEBS Letts. 221: 43-47, 1987. |
| zein | Matzke et al Plant Mol Biol, 14(3): 323-32 1990 |
| napA | Stalberg et al, Planta 199: 515-519, 1996. |
| wheat LMW and HMW | Mol Gen Genet 216: 81-90, 1989; NAR 17: 461-2, 1989 |
| glutenin-1 | |
| wheat SPA | Albani et al, Plant Cell, 9: 171-184, 1997 |
| wheat α, β, γ-gliadins | EMBO J. 3: 1409-15, 1984 |
| barley Itr1 promoter | Diaz et al. (1995) Mol Gen Genet 248(5): 592-8 |
| barley B1, C, D, hordein | Theor Appl Gen 98: 1253-62, 1999; Plant J 4: 343-55, |
| | 1993; Mol Gen Genet 250: 750-60, 1996 |
| barley DOF | Mena et al, The Plant Journal, 116(1): 53-62, 1998 |
| blz2 | EP99106056.7 |
| synthetic promoter | Vicente-Carbajosa et al., Plant J. 13: 629-640, 1998. |
| rice prolamin NRP33 | Wu et al, Plant Cell Physiology 39(8) 885-889, 1998 |
| rice a-globulin Glb-1 | Wu et al, Plant Cell Physiology 39(8) 885-889, 1998 |
| rice OSH1 | Sato et al, Proc. Natl. Acad. Sci. USA, 93: 8117-8122, |
| | 1996 |
| rice α-globulin REB/OHP-1 | Nakase et al. Plant Mol. Biol. 33: 513-522, 1997 |
| rice ADP-glucose pyrophos- | Trans Res 6: 157-68, 1997 |
| phorylase | |
| maize ESR gene family | Plant J 12: 235-46, 1997 |
| sorghum α-kafirin | DeRose et al., Plant Mol. Biol 32: 1029-35, 1996 |
| KNOX | Postma-Haarsma et al, Plant Mol. Biol. 39: 257-71, 1999 |
| rice oleosin | Wu et al, J. Biochem. 123: 386, 1998 |
| sunflower oleosin | Cummins et al., Plant Mol. Biol. 19: 873-876, 1992 |
| PRO0117, putative rice 40S | WO 2004/070039 |
| ribosomal protein | |
| PRO0136, rice alanine | unpublished |
| aminotransferase | |
| PRO0147, trypsin inhibitor | unpublished |
| ITR1 (barley) | |
| PRO0151, rice WSI18 | WO 2004/070039 |
| PRO0175, rice RAB21 | WO 2004/070039 |
| PRO005 | WO 2004/070039 |
| PRO0095 | WO 2004/070039 |
| α-amylase (Amy32b) | Lanahan et al, Plant Cell 4: 203-211, 1992; Skriver et al, |
| | Proc Natl Acad Sci USA 88: 7266-7270, 1991 |
| cathepsin β-like gene | Cejudo et al, Plant Mol Biol 20: 849-856, 1992 |
| Barley Ltp2 | Kalla et al., Plant J. 6: 849-60, 1994 |
| Chi26 | Leah et al., Plant J. 4: 579-89, 1994 |
| Maize B-Peru | Selinger et al., Genetics 149; 1125-38, 1998 |

TABLE 2d
examples of endosperm-specific promoters

| Gene source | Reference |
|---|---|
| glutelin (rice) | Takaiwa et al. (1986) Mol Gen Genet 208: 15-22; |
| | Takaiwa et al. (1987) FEBS Letts. 221: 43-47 |
| zein | Matzke et al., (1990) Plant Mol Biol 14(3): 323-32 |
| wheat LMW and | Colot et al. (1989) Mol Gen Genet 216: 81-90, |
| HMW glutenin-1 | Anderson et al. (1989) NAR 17: 461-2 |
| wheat SPA | Albani et al. (1997) Plant Cell 9: 171-184 |
| wheat gliadins | Rafalski et al. (1984) EMBO 3: 1409-15 |
| barley Itr1 | Diaz et al. (1995) Mol Gen Genet 248(5): 592-8 |
| promoter | |
| barley B1, | Cho et al. (1999) Theor Appl Genet 98: 1253-62; |
| C, D, hordein | Muller et al. (1993) Plant J 4: 343-55; |
| | Sorenson et al. (1996) Mol Gen Genet 250: 750-60 |
| barley DOF | Mena et al, (1998) Plant J 116(1): 53-62 |
| blz2 | Onate et al. (1999) J Biol Chem 274(14): 9175-82 |
| synthetic promoter | Vicente-Carbajosa et al. (1998) Plant J 13: 629-640 |
| rice prolamin | Wu et al, (1998) Plant Cell Physiol 39(8) 885-889 |
| NRP33 | |
| rice globulin Glb-1 | Wu et al. (1998) Plant Cell Physiol 39(8) 885-889 |
| rice globulin | Nakase et al. (1997) Plant Molec Biol 33: 513-522 |
| REB/OHP-1 | |
| rice ADP-glucose | Russell et al. (1997) Trans Res 6: 157-68 |
| pyrophosphorylase | |
| maize ESR gene | Opsahl-Ferstad et al. (1997) Plant J 12: 235-46 |
| family | |
| sorghum kafirin | DeRose et al. (1996) Plant Mol Biol 32: 1029-35 |

TABLE 2e
Examples of embryo specific promoters:

| Gene source | Reference |
|---|---|
| rice OSH1 | Sato et al, Proc. Natl. Acad. Sci. USA, 93: 8117-8122, |
| | 1996 |
| KNOX | Postma-Haarsma et al, Plant Mol. Biol. 39: 257-71, 1999 |
| PRO0151 | WO 2004/070039 |
| PRO0175 | WO 2004/070039 |
| PRO005 | WO 2004/070039 |
| PRO0095 | WO 2004/070039 |

TABLE 2f
Examples of aleurone-specific promoters:

| Gene source | Reference |
|---|---|
| α-amylase (Amy32b) | Lanahan et al, Plant Cell 4: 203-211, 1992; |
| | Skriver et al, Proc Natl Acad Sci USA 88: |
| | 7266-7270, 1991 |
| cathepsin β-like gene | Cejudo et al, Plant Mol Biol 20: 849-856, 1992 |
| Barley Ltp2 | Kalla et al., Plant J. 6: 849-60, 1994 |
| Chi26 | Leah et al., Plant J. 4: 579-89, 1994 |
| Maize B-Peru | Selinger et al., Genetics 149; 1125-38, 1998 |

[0092] A green tissue-specific promoter as defined herein is a promoter that is transcriptionally active predominantly in green tissue, substantially to the exclusion of any other parts of a plant, whilst still allowing for any leaky expression in these other plant parts.

[0093] Examples of green tissue-specific promoters which may be used to perform the methods of the invention are shown in Table 2g below.

TABLE 2g
Examples of green tissue-specific promoters

| Gene | Expression | Reference |
|---|---|---|
| Maize | Leaf specific | Fukavama et al., Plant Physiol. |
| Orthophosphate | | 2001 November; 127(3): |
| dikinase | | 1136-46 |
| Maize | Leaf specific | Kausch et al., Plant Mol Biol. |
| Phosphoenolpyruvate | | 2001 January; 45(1): 1-15 |
| carboxylase | | |
| Rice | Leaf specific | Lin et al., 2004 DNA Seq. 2004 |
| Phosphoenolpyruvate | | August; 15(4): 269-76 |
| carboxylase | | |
| Rice small | Leaf specific | Nomura et al., Plant Mol Biol. |
| subunit Rubisco | | 2000 September; 44(1): 99-106 |
| rice beta | Shoot specific | WO 2004/070039 |
| expansin EXBP9 | | |
| Pigeonpea small | Leaf specific | Panguluri et al., Indian J Exp |
| subunit Rubisco | | Biol. 2005 April; 43(4): |
| | | 369-72 |
| Pea RBCS3A | Leaf specific | |

[0094] Another example of a tissue-specific promoter is a meristem-specific promoter, which is transcriptionally active predominantly in meristematic tissue, substantially to the exclusion of any other parts of a plant, whilst still allowing for any leaky expression in these other plant parts. Examples of green meristem-specific promoters which may be used to perform the methods of the invention are shown in Table 2h below.

TABLE 2h
Examples of meristem-specific promoters

| Gene source | Expression pattern | Reference |
|---|---|---|
| rice OSH1 | Shoot apical meristem, | Sato et al. (1996) |
| | from embryo globular stage | Proc. Natl. Acad. |
| | to seedling stage | Sci. USA, 93: 8117-8122 |
| Rice | Meristem specific | BAD87835.1 |
| metallothionein | | |
| WAK1 & | Shoot and root apical | Wagner & Kohorn (2001) |
| WAK 2 | meristems, and in | Plant Cell |
| | expanding leaves and | 13(2): 303-318 |
| | sepals | |

[0095] Terminator

[0096] The term “terminator” encompasses a control sequence which is a DNA sequence at the end of a transcriptional unit which signals 3′ processing and polyadenylation of a primary transcript and termination of transcription. The terminator can be derived from the natural gene, from a variety of other plant genes, or from T-DNA. The terminator to be added may be derived from, for example, the nopaline synthase or octopine synthase genes, or alternatively from another plant gene, or less preferably from any other eukaryotic gene.

[0097] Selectable Marker (Gene)/Reporter Gene

[0098] “Selectable marker”, “selectable marker gene” or “reporter gene” includes any gene that confers a phenotype on a cell in which it is expressed to facilitate the identification and/or selection of cells that are transfected or transformed with a nucleic acid construct of the invention. These marker genes enable the identification of a successful transfer of the nucleic acid molecules via a series of different principles. Suitable markers may be selected from markers that confer antibiotic or herbicide resistance, that introduce a new metabolic trait or that allow visual selection. Examples of selectable marker genes include genes conferring resistance to antibiotics (such as nptII that phosphorylates neomycin and kanamycin, or hpt, phosphorylating hygromycin, or genes conferring resistance to, for example, bleomycin, streptomycin, tetracyclin, chloramphenicol, ampicillin, gentamycin, geneticin (G418), spectinomycin or blasticidin), to herbicides (for example bar which provides resistance to Basta®; aroA or gox providing resistance against glyphosate, or the genes conferring resistance to, for example, imidazolinone, phosphinothricin or sulfonylurea), or genes that provide a metabolic trait (such as manA that allows plants to use mannose as sole carbon source or xylose isomerase for the utilisation of xylose, or antinutritive markers such as the resistance to 2-deoxyglucose). Expression of visual marker genes results in the formation of colour (for example β-glucuronidase, GUS or β-galactosidase with its coloured substrates, for example X-Gal), luminescence (such as the luciferin/luceferase system) or fluorescence (Green Fluorescent Protein, GFP, and derivatives thereof). This list represents only a small number of possible markers. The skilled worker is familiar with such markers. Different markers are preferred, depending on the organism and the selection method.

[0099] It is known that upon stable or transient integration of nucleic acids into plant cells, only a minority of the cells takes up the foreign DNA and, if desired, integrates it into its genome, depending on the expression vector used and the transfection technique used. To identify and select these integrants, a gene coding for a selectable marker (such as the ones described above) is usually introduced into the host cells together with the gene of interest. These markers can for example be used in mutants in which these genes are not functional by, for example, deletion by conventional methods. Furthermore, nucleic acid molecules encoding a selectable marker can be introduced into a host cell on the same vector that comprises the sequence encoding the polypeptides of the invention or used in the methods of the invention, or else in a separate vector. Cells which have been stably transfected with the introduced nucleic acid can be identified for example by selection (for example, cells which have integrated the selectable marker survive whereas the other cells die).

[0100] Since the marker genes, particularly genes for resistance to antibiotics and herbicides, are no longer required or are undesired in the transgenic host cell once the nucleic acids have been introduced successfully, the process according to the invention for introducing the nucleic acids advantageously employs techniques which enable the removal or excision of these marker genes. One such a method is what is known as co-transformation. The co-transformation method employs two vectors simultaneously for the transformation, one vector bearing the nucleic acid according to the invention and a second bearing the marker gene(s). A large proportion of transformants receives or, in the case of plants, comprises (up to 40% or more of the transformants), both vectors. In case of transformation with Agrobacteria, the transformants usually receive only a part of the vector, i.e. the sequence flanked by the T-DNA, which usually represents the expression cassette. The marker genes can subsequently be removed from the transformed plant by performing crosses. In another method, marker genes integrated into a transposon are used for the transformation together with desired nucleic acid (known as the Ac/Ds technology). The transformants can be crossed with a transposase source or the transformants are transformed with a nucleic acid construct conferring expression of a transposase, transiently or stable. In some cases (approx. 10%), the transposon jumps out of the genome of the host cell once transformation has taken place successfully and is lost. In a further number of cases, the transposon jumps to a different location. In these cases the marker gene must be eliminated by performing crosses. In microbiology, techniques were developed which make possible, or facilitate, the detection of such events. A further advantageous method relies on what is known as recombination systems; whose advantage is that elimination by crossing can be dispensed with. The best-known system of this type is what is known as the Cre/lox system. Cre1 is a recombinase that removes the sequences located between the loxP sequences. If the marker gene is integrated between the loxP sequences, it is removed once transformation has taken place successfully, by expression of the recombinase. Further recombination systems are the HIN/HIX, FLP/FRT and REP/STB system (Tribble et al., J. Biol. Chem., 275, 2000: 22255-22267; Velmurugan et al., J. Cell Biol., 149, 2000: 553-566). A site-specific integration into the plant genome of the nucleic acid sequences according to the invention is possible. Naturally, these methods can also be applied to microorganisms such as yeast, fungi or bacteria.

[0101] Transgenic/Transgene/Recombinant

[0102] For the purposes of the invention, “transgenic”, “transgene” or “recombinant” means with regard to, for example, a nucleic acid sequence, an expression cassette, gene construct or a vector comprising the nucleic acid sequence or an organism transformed with the nucleic acid sequences, expression cassettes or vectors according to the invention, all those constructions brought about by recombinant methods in which either
[0103] (a) the nucleic acid sequences encoding proteins useful in the methods of the invention, or
[0104] (b) genetic control sequence(s) which is operably linked with the nucleic acid sequence according to the invention, for example a promoter, or
[0105] (c) a) and b)
   are not located in their natural genetic environment or have been modified by recombinant methods, it being possible for the modification to take the form of, for example, a substitution, addition, deletion, inversion or insertion of one or more nucleotide residues. The natural genetic environment is understood as meaning the natural genomic or chromosomal locus in the original plant or the presence in a genomic library. In the case of a genomic library, the natural genetic environment of the nucleic acid sequence is preferably retained, at least in part. The environment flanks the nucleic acid sequence at least on one side and has a sequence length of at least 50 bp, preferably at least 500 bp, especially preferably at least 1000 bp, most preferably at least 5000 bp. A naturally occurring expression cassette—for example the naturally occurring combination of the natural promoter of the nucleic acid sequences with the corresponding nucleic acid sequence encoding a polypeptide useful in the methods of the present invention, as defined above—becomes a transgenic expression cassette when this expression cassette is modified by non-natural, synthetic (“artificial”) methods such as, for example, mutagenic treatment. Suitable methods are described, for example, in U.S. Pat. No. 5,565,350 or WO 00/15815.

[0106] A transgenic plant for the purposes of the invention is thus understood as meaning, as above, that the nucleic acids used in the method of the invention are not present in, or originating from, the genome of said plant, or are present in the genome of said plant but not at their natural locus in the genome of said plant, it being possible for the nucleic acids to be expressed homologously or heterologously. However, as mentioned, transgenic also means that, while the nucleic acids according to the invention or used in the inventive method are at their natural position in the genome of a plant, the sequence has been modified with regard to the natural sequence, and/or that the regulatory sequences of the natural sequences have been modified. Transgenic is preferably understood as meaning the expression of the nucleic acids according to the invention at an unnatural locus in the genome, i.e. homologous or, preferably, heterologous expression of the nucleic acids takes place. Preferred transgenic plants are mentioned herein.

[0107] It shall further be noted that in the context of the present invention, the term “isolated nucleic acid” or “isolated polypeptide” may in some instances be considered as a synonym for a “recombinant nucleic acid” or a “recombinant polypeptide”, respectively and refers to a nucleic acid or polypeptide that is not located in its natural genetic environment and/or that has been modified by recombinant methods.

[0108] Modulation

[0109] The term “modulation” means in relation to expression or gene expression, a process in which the expression level is changed by said gene expression in comparison to the control plant, the expression level may be increased or decreased. The original, unmodulated expression may be of any kind of expression of a structural RNA (rRNA, tRNA) or mRNA with subsequent translation. For the purposes of this invention, the original unmodulated expression may also be absence of any expression. The term “modulating the activity” shall mean any change of the expression of the inventive nucleic acid sequences or encoded proteins, which leads to increased yield and/or increased growth of the plants. The expression can increase from zero (absence of, or immeasurable expression) to a certain amount, or can decrease from a certain amount to immeasurable small amounts or zero.

[0110] Expression

[0111] The term “expression” or “gene expression” means the transcription of a specific gene or specific genes or specific genetic construct. The term “expression” or “gene expression” in particular means the transcription of a gene or genes or genetic construct into structural RNA (rRNA, tRNA) or mRNA with or without subsequent translation of the latter into a protein. The process includes transcription of DNA and processing of the resulting mRNA product.

[0112] Increased Expression/Overexpression

[0113] The term “increased expression” or “overexpression” as used herein means any form of expression that is additional to the original wild-type expression level. For the purposes of this invention, the original wild-type expression level might also be zero, i.e. absence of expression or immeasurable expression.

[0114] Methods for increasing expression of genes or gene products are well documented in the art and include, for example, overexpression driven by appropriate promoters, the use of transcription enhancers or translation enhancers. Isolated nucleic acids which serve as promoter or enhancer elements may be introduced in an appropriate position (typically upstream) of a non-heterologous form of a polynucleotide so as to upregulate expression of a nucleic acid encoding the polypeptide of interest. For example, endogenous promoters may be altered in vivo by mutation, deletion, and/or substitution (see, Kmiec, U.S. Pat. No. 5,565,350; Zarling et al., WO9322443), or isolated promoters may be introduced into a plant cell in the proper orientation and distance from a gene of the present invention so as to control the expression of the gene.

[0115] If polypeptide expression is desired, it is generally desirable to include a polyadenylation region at the 3′-end of a polynucleotide coding region. The polyadenylation region can be derived from the natural gene, from a variety of other plant genes, or from T-DNA. The 3′ end sequence to be added may be derived from, for example, the nopaline synthase or octopine synthase genes, or alternatively from another plant gene, or less preferably from any other eukaryotic gene.

[0116] An intron sequence may also be added to the 5′ untranslated region (UTR) or the coding sequence of the partial coding sequence to increase the amount of the mature message that accumulates in the cytosol. Inclusion of a spliceable intron in the transcription unit in both plant and animal expression constructs has been shown to increase gene expression at both the mRNA and protein levels up to 1000-fold (Buchman and Berg (1988) Mol. Cell biol. 8: 4395-4405; Callis et al. (1987) Genes Dev 1:1183-1200). Such intron enhancement of gene expression is typically greatest when placed near the 5′ end of the transcription unit. Use of the maize introns Adh1-S intron 1, 2, and 6, the Bronze-1 intron are known in the art. For general information see: The Maize Handbook, Chapter 116, Freeling and Walbot, Eds., Springer, N.Y. (1994).

[0117] Decreased Expression

[0118] Reference herein to “decreased expression” or “reduction or substantial elimination” of expression is taken to mean a decrease in endogenous gene expression and/or polypeptide levels and/or polypeptide activity relative to control plants. The reduction or substantial elimination is in increasing order of preference at least 10%, 20%, 30%, 40% or 50%, 60%, 70%, 80%, 85%, 90%, or 95%, 96%, 97%, 98%, 99% or more reduced compared to that of control plants.

[0119] For the reduction or substantial elimination of expression an endogenous gene in a plant, a sufficient length of substantially contiguous nucleotides of a nucleic acid sequence is required. In order to perform gene silencing, this may be as little as 20, 19, 18, 17, 16, 15, 14, 13, 12, 11, 10 or fewer nucleotides, alternatively this may be as much as the entire gene (including the 5′ and/or 3′ UTR, either in part or in whole). The stretch of substantially contiguous nucleotides may be derived from the nucleic acid encoding the protein of interest (target gene), or from any nucleic acid capable of encoding an orthologue, paralogue or homologue of the protein of interest. Preferably, the stretch of substantially contiguous nucleotides is capable of forming hydrogen bonds with the target gene (either sense or antisense strand), more preferably, the stretch of substantially contiguous nucleotides has, in increasing order of preference, 50%, 60%, 70%, 80%, 85%, 90%, 95%, 96%, 97%, 98%, 99%, 100% sequence identity to the target gene (either sense or antisense strand). A nucleic acid sequence encoding a (functional) polypeptide is not a requirement for the various methods discussed herein for the reduction or substantial elimination of expression of an endogenous gene.

[0120] This reduction or substantial elimination of expression may be achieved using routine tools and techniques. A preferred method for the reduction or substantial elimination of endogenous gene expression is by introducing and expressing in a plant a genetic construct into which the nucleic acid (in this case a stretch of substantially contiguous nucleotides derived from the gene of interest, or from any nucleic acid capable of encoding an orthologue, paralogue or homologue of any one of the protein of interest) is cloned as an inverted repeat (in part or completely), separated by a spacer (non-coding DNA).

[0121] In such a preferred method, expression of the endogenous gene is reduced or substantially eliminated through RNA-mediated silencing using an inverted repeat of a nucleic acid or a part thereof (in this case a stretch of substantially contiguous nucleotides derived from the gene of interest, or from any nucleic acid capable of encoding an orthologue, paralogue or homologue of the protein of interest), preferably capable of forming a hairpin structure. The inverted repeat is cloned in an expression vector comprising control sequences. A non-coding DNA nucleic acid sequence (a spacer, for example a matrix attachment region fragment (MAR), an intron, a polylinker, etc.) is located between the two inverted nucleic acids forming the inverted repeat. After transcription of the inverted repeat, a chimeric RNA with a self-complementary structure is formed (partial or complete). This double-stranded RNA structure is referred to as the hairpin RNA (hpRNA). The hpRNA is processed by the plant into siRNAs that are incorporated into an RNA-induced silencing complex (RISC). The RISC further cleaves the mRNA transcripts, thereby substantially reducing the number of mRNA transcripts to be translated into polypeptides. For further general details see for example, Grierson et al. (1998) WO 98/53083; Waterhouse et al. (1999) WO 99/53050).

[0122] Performance of the methods of the invention does not rely on introducing and expressing in a plant a genetic construct into which the nucleic acid is cloned as an inverted repeat, but any one or more of several well-known “gene silencing” methods may be used to achieve the same effects.

[0123] One such method for the reduction of endogenous gene expression is RNA-mediated silencing of gene expression (downregulation). Silencing in this case is triggered in a plant by a double stranded RNA sequence (dsRNA) that is substantially similar to the target endogenous gene. This dsRNA is further processed by the plant into about 20 to about 26 nucleotides called short interfering RNAs (siRNAs). The siRNAs are incorporated into an RNA-induced silencing complex (RISC) that cleaves the mRNA transcript of the endogenous target gene, thereby substantially reducing the number of mRNA transcripts to be translated into a polypeptide. Preferably, the double stranded RNA sequence corresponds to a target gene.

[0124] Another example of an RNA silencing method involves the introduction of nucleic acid sequences or parts thereof (in this case a stretch of substantially contiguous nucleotides derived from the gene of interest, or from any nucleic acid capable of encoding an orthologue, paralogue or homologue of the protein of interest) in a sense orientation into a plant. “Sense orientation” refers to a DNA sequence that is homologous to an mRNA transcript thereof. Introduced into a plant would therefore be at least one copy of the nucleic acid sequence. The additional nucleic acid sequence will reduce expression of the endogenous gene, giving rise to a phenomenon known as co-suppression. The reduction of gene expression will be more pronounced if several additional copies of a nucleic acid sequence are introduced into the plant, as there is a positive correlation between high transcript levels and the triggering of co-suppression.

[0125] Another example of an RNA silencing method involves the use of antisense nucleic acid sequences. An “antisense” nucleic acid sequence comprises a nucleotide sequence that is complementary to a “sense” nucleic acid sequence encoding a protein, i.e. complementary to the coding strand of a double-stranded cDNA molecule or complementary to an mRNA transcript sequence. The antisense nucleic acid sequence is preferably complementary to the endogenous gene to be silenced. The complementarity may be located in the “coding region” and/or in the “non-coding region” of a gene. The term “coding region” refers to a region of the nucleotide sequence comprising codons that are translated into amino acid residues. The term “non-coding region” refers to 5′ and 3′ sequences that flank the coding region that are transcribed but not translated into amino acids (also referred to as 5′ and 3′ untranslated regions).

[0126] Antisense nucleic acid sequences can be designed according to the rules of Watson and Crick base pairing. The antisense nucleic acid sequence may be complementary to the entire nucleic acid sequence (in this case a stretch of substantially contiguous nucleotides derived from the gene of interest, or from any nucleic acid capable of encoding an orthologue, paralogue or homologue of the protein of interest), but may also be an oligonucleotide that is antisense to only a part of the nucleic acid sequence (including the mRNA 5′ and 3′ UTR). For example, the antisense oligonucleotide sequence may be complementary to the region surrounding the translation start site of an mRNA transcript encoding a polypeptide. The length of a suitable antisense oligonucleotide sequence is known in the art and may start from about 50, 45, 40, 35, 30, 25, 20, 15 or 10 nucleotides in length or less. An antisense nucleic acid sequence according to the invention may be constructed using chemical synthesis and enzymatic ligation reactions using methods known in the art. For example, an antisense nucleic acid sequence (e.g., an antisense oligonucleotide sequence) may be chemically synthesized using naturally occurring nucleotides or variously modified nucleotides designed to increase the biological stability of the molecules or to increase the physical stability of the duplex formed between the antisense and sense nucleic acid sequences, e.g., phosphorothioate derivatives and acridine substituted nucleotides may be used. Examples of modified nucleotides that may be used to generate the antisense nucleic acid sequences are well known in the art. Known nucleotide modifications include methylation, cyclization and ‘caps’ and substitution of one or more of the naturally occurring nucleotides with an analogue such as inosine. Other modifications of nucleotides are well known in the art.

[0127] The antisense nucleic acid sequence can be produced biologically using an expression vector into which a nucleic acid sequence has been subcloned in an antisense orientation (i.e., RNA transcribed from the inserted nucleic acid will be of an antisense orientation to a target nucleic acid of interest). Preferably, production of antisense nucleic acid sequences in plants occurs by means of a stably integrated nucleic acid construct comprising a promoter, an operably linked antisense oligonucleotide, and a terminator.

[0128] The nucleic acid molecules used for silencing in the methods of the invention (whether introduced into a plant or generated in situ) hybridize with or bind to mRNA transcripts and/or genomic DNA encoding a polypeptide to thereby inhibit expression of the protein, e.g., by inhibiting transcription and/or translation. The hybridization can be by conventional nucleotide complementarity to form a stable duplex, or, for example, in the case of an antisense nucleic acid sequence which binds to DNA duplexes, through specific interactions in the major groove of the double helix. Antisense nucleic acid sequences may be introduced into a plant by transformation or direct injection at a specific tissue site. Alternatively, antisense nucleic acid sequences can be modified to target selected cells and then administered systemically. For example, for systemic administration, antisense nucleic acid sequences can be modified such that they specifically bind to receptors or antigens expressed on a selected cell surface, e.g., by linking the antisense nucleic acid sequence to peptides or antibodies which bind to cell surface receptors or antigens. The antisense nucleic acid sequences can also be delivered to cells using the vectors described herein.

[0129] According to a further aspect, the antisense nucleic acid sequence is an a-anomeric nucleic acid sequence. An a-anomeric nucleic acid sequence forms specific double-stranded hybrids with complementary RNA in which, contrary to the usual b-units, the strands run parallel to each other (Gaultier et al. (1987) Nucl Ac Res 15: 6625-6641). The antisense nucleic acid sequence may also comprise a 2′-o-methylribonucleotide (Inoue et al. (1987) Nucl Ac Res 15, 6131-6148) or a chimeric RNA-DNA analogue (Inoue et al. (1987) FEBS Lett. 215, 327-330).

[0130] The reduction or substantial elimination of endogenous gene expression may also be performed using ribozymes. Ribozymes are catalytic RNA molecules with ribonuclease activity that are capable of cleaving a single-stranded nucleic acid sequence, such as an mRNA, to which they have a complementary region. Thus, ribozymes (e.g., hammerhead ribozymes (described in Haselhoff and Gerlach (1988) Nature 334, 585-591) can be used to catalytically cleave mRNA transcripts encoding a polypeptide, thereby substantially reducing the number of mRNA transcripts to be translated into a polypeptide. A ribozyme having specificity for a nucleic acid sequence can be designed (see for example: Cech et al. U.S. Pat. No. 4,987,071; and Cech et al. U.S. Pat. No. 5,116,742). Alternatively, mRNA transcripts corresponding to a nucleic acid sequence can be used to select a catalytic RNA having a specific ribonuclease activity from a pool of RNA molecules (Bartel and Szostak (1993) Science 261, 1411-1418). The use of ribozymes for gene silencing in plants is known in the art (e.g., Atkins et al. (1994) WO 94/00012; Lenne et al. (1995) WO 95/03404; Lutziger et al. (2000) WO 00/00619; Prinsen et al. (1997) WO 97/13865 and Scott et al. (1997) WO 97/38116).

[0131] Gene silencing may also be achieved by insertion mutagenesis (for example, T-DNA insertion or transposon insertion) or by strategies as described by, among others, Angell and Baulcombe ((1999) Plant J 20(3): 357-62), (Amplicon VIGS WO 98/36083), or Baulcombe (WO 99/15682).

[0132] Gene silencing may also occur if there is a mutation on an endogenous gene and/or a mutation on an isolated gene/nucleic acid subsequently introduced into a plant. The reduction or substantial elimination may be caused by a non-functional polypeptide. For example, the polypeptide may bind to various interacting proteins; one or more mutation(s) and/or truncation(s) may therefore provide for a polypeptide that is still able to bind interacting proteins (such as receptor proteins) but that cannot exhibit its normal function (such as signalling ligand).

[0133] A further approach to gene silencing is by targeting nucleic acid sequences complementary to the regulatory region of the gene (e.g., the promoter and/or enhancers) to form triple helical structures that prevent transcription of the gene in target cells. See Helene, C., Anticancer Drug Res. 6, 569-84, 1991; Helene et al., Ann. N.Y. Acad. Sci. 660, 27-36 1992; and Maher, L. J. Bioassays 14, 807-15, 1992.

[0134] Other methods, such as the use of antibodies directed to an endogenous polypeptide for inhibiting its function in planta, or interference in the signalling pathway in which a polypeptide is involved, will be well known to the skilled man. In particular, it can be envisaged that manmade molecules may be useful for inhibiting the biological function of a target polypeptide, or for interfering with the signalling pathway in which the target polypeptide is involved.

[0135] Alternatively, a screening program may be set up to identify in a plant population natural variants of a gene, which variants encode polypeptides with reduced activity. Such natural variants may also be used for example, to perform homologous recombination.

[0136] Artificial and/or natural microRNAs (miRNAs) may be used to knock out gene expression and/or mRNA translation. Endogenous miRNAs are single stranded small RNAs of typically 19-24 nucleotides long. They function primarily to regulate gene expression and/or mRNA translation. Most plant microRNAs (miRNAs) have perfect or near-perfect complementarity with their target sequences. However, there are natural targets with up to five mismatches. They are processed from longer non-coding RNAs with characteristic fold-back structures by double-strand specific RNases of the Dicer family. Upon processing, they are incorporated in the RNA-induced silencing complex (RISC) by binding to its main component, an Argonaute protein. MiRNAs serve as the specificity components of RISC, since they base-pair to target nucleic acids, mostly mRNAs, in the cytoplasm. Subsequent regulatory events include target mRNA cleavage and destruction and/or translational inhibition. Effects of miRNA overexpression are thus often reflected in decreased mRNA levels of target genes.

[0137] Artificial microRNAs (amiRNAs), which are typically 21 nucleotides in length, can be genetically engineered specifically to negatively regulate gene expression of single or multiple genes of interest. Determinants of plant microRNA target selection are well known in the art. Empirical parameters for target recognition have been defined and can be used to aid in the design of specific amiRNAs, (Schwab et al., Dev. Cell 8, 517-527, 2005). Convenient tools for design and generation of amiRNAs and their precursors are also available to the public (Schwab et al., Plant Cell 18, 1121-1133, 2006).

[0138] For optimal performance, the gene silencing techniques used for reducing expression in a plant of an endogenous gene requires the use of nucleic acid sequences from monocotyledonous plants for transformation of monocotyledonous plants, and from dicotyledonous plants for transformation of dicotyledonous plants. Preferably, a nucleic acid sequence from any given plant species is introduced into that same species. For example, a nucleic acid sequence from rice is transformed into a rice plant. However, it is not an absolute requirement that the nucleic acid sequence to be introduced originates from the same plant species as the plant in which it will be introduced. It is sufficient that there is substantial homology between the endogenous target gene and the nucleic acid to be introduced.

[0139] Described above are examples of various methods for the reduction or substantial elimination of expression in a plant of an endogenous gene. A person skilled in the art would readily be able to adapt the aforementioned methods for silencing so as to achieve reduction of expression of an endogenous gene in a whole plant or in parts thereof through the use of an appropriate promoter, for example.

[0140] Transformation

[0141] The term “introduction” or “transformation” as referred to herein encompasses the transfer of an exogenous polynucleotide into a host cell, irrespective of the method used for transfer. Plant tissue capable of subsequent clonal propagation, whether by organogenesis or embryogenesis, may be transformed with a genetic construct of the present invention and a whole plant regenerated there from. The particular tissue chosen will vary depending on the clonal propagation systems available for, and best suited to, the particular species being transformed. Exemplary tissue targets include leaf disks, pollen, embryos, cotyledons, hypocotyls, megagametophytes, callus tissue, existing meristematic tissue (e.g., apical meristem, axillary buds, and root meristems), and induced meristem tissue (e.g., cotyledon meristem and hypocotyl meristem). The polynucleotide may be transiently or stably introduced into a host cell and may be maintained non-integrated, for example, as a plasmid. Alternatively, it may be integrated into the host genome. The resulting transformed plant cell may then be used to regenerate a transformed plant in a manner known to persons skilled in the art.

[0142] The transfer of foreign genes into the genome of a plant is called transformation. Transformation of plant species is now a fairly routine technique. Advantageously, any of several transformation methods may be used to introduce the gene of interest into a suitable ancestor cell. The methods described for the transformation and regeneration of plants from plant tissues or plant cells may be utilized for transient or for stable transformation. Transformation methods include the use of liposomes, electroporation, chemicals that increase free DNA uptake, injection of the DNA directly into the plant, particle gun bombardment, transformation using viruses or pollen and microprojection. Methods may be selected from the calcium/polyethylene glycol method for protoplasts (Krens, F. A. et al., (1982) Nature 296, 72-74; Negrutiu I et al. (1987) Plant Mol Biol 8: 363-373); electroporation of protoplasts (Shillito R. D. et al. (1985) Bio/Technol 3, 1099-1102); microinjection into plant material (Crossway A et al., (1986) Mol. Gen Genet 202: 179-185); DNA or RNA-coated particle bombardment (Klein T M et al., (1987) Nature 327: 70) infection with (non-integrative) viruses and the like. Transgenic plants, including transgenic crop plants, are preferably produced via Agrobacterium-mediated transformation. An advantageous transformation method is the transformation in planta. To this end, it is possible, for example, to allow the agrobacteria to act on plant seeds or to inoculate the plant meristem with agrobacteria. It has proved particularly expedient in accordance with the invention to allow a suspension of transformed agrobacteria to act on the intact plant or at least on the flower primordia. The plant is subsequently grown on until the seeds of the treated plant are obtained (Clough and Bent, Plant J. (1998) 16, 735-743). Methods for Agrobacterium-mediated transformation of rice include well known methods for rice transformation, such as those described in any of the following: European patent application EP 1198985 A1, Aldemita and Hodges (Planta 199: 612-617, 1996); Chan et al. (Plant Mol Biol 22 (3): 491-506, 1993), Hiei et al. (Plant J 6 (2): 271-282, 1994), which disclosures are incorporated by reference herein as if fully set forth. In the case of corn transformation, the preferred method is as described in either Ishida et al. (Nat. Biotechnol 14(6): 745-50, 1996) or Frame et al. (Plant Physiol 129(1): 13-22, 2002), which disclosures are incorporated by reference herein as if fully set forth. Said methods are further described by way of example in B. Jenes et al., Techniques for Gene Transfer, in: Transgenic Plants, Vol. 1, Engineering and Utilization, eds. S. D. Kung and R. Wu, Academic Press (1993) 128-143 and in Potrykus Annu. Rev. Plant Physiol. Plant Molec. Biol. 42 (1991) 205-225). The nucleic acids or the construct to be expressed is preferably cloned into a vector, which is suitable for transforming Agrobacterium tumefaciens, for example pBin19 (Bevan et al., Nucl. Acids Res. 12 (1984) 8711). Agrobacteria transformed by such a vector can then be used in known manner for the transformation of plants, such as plants used as a model, like Arabidopsis (Arabidopsis thaliana is within the scope of the present invention not considered as a crop plant), or crop plants such as, by way of example, tobacco plants, for example by immersing bruised leaves or chopped leaves in an agrobacterial solution and then culturing them in suitable media. The transformation of plants by means of Agrobacterium tumefaciens is described, for example, by Hofgen and Willmitzer in Nucl. Acid Res. (1988) 16, 9877 or is known inter alia from F. F. White, Vectors for Gene Transfer in Higher Plants; in Transgenic Plants, Vol. 1, Engineering and Utilization, eds. S. D. Kung and R. Wu, Academic Press, 1993, pp. 15-38.

[0143] In addition to the transformation of somatic cells, which then have to be regenerated into intact plants, it is also possible to transform the cells of plant meristems and in particular those cells which develop into gametes. In this case, the transformed gametes follow the natural plant development, giving rise to transgenic plants. Thus, for example, seeds of Arabidopsis are treated with agrobacteria and seeds are obtained from the developing plants of which a certain proportion is transformed and thus transgenic [Feldman, K A and Marks M D (1987). Mol Gen Genet 208:1-9; Feldmann K (1992). In: C Koncz, N-H Chua and J Shell, eds, Methods in Arabidopsis Research. Word Scientific, Singapore, pp. 274-289]. Alternative methods are based on the repeated removal of the inflorescences and incubation of the excision site in the center of the rosette with transformed agrobacteria, whereby transformed seeds can likewise be obtained at a later point in time (Chang (1994). Plant J. 5: 551-558; Katavic (1994). Mol Gen Genet, 245: 363-370). However, an especially effective method is the vacuum infiltration method with its modifications such as the “floral dip” method. In the case of vacuum infiltration of Arabidopsis, intact plants under reduced pressure are treated with an agrobacterial suspension [Bechthold, N (1993). C R Acad Sci Paris Life Sci, 316: 1194-1199], while in the case of the “floral dip” method the developing floral tissue is incubated briefly with a surfactant-treated agrobacterial suspension [Clough, SJ and Bent A F (1998) The Plant J. 16, 735-743]. A certain proportion of transgenic seeds are harvested in both cases, and these seeds can be distinguished from non-transgenic seeds by growing under the above-described selective conditions. In addition the stable transformation of plastids is of advantages because plastids are inherited maternally is most crops reducing or eliminating the risk of transgene flow through pollen. The transformation of the chloroplast genome is generally achieved by a process which has been schematically displayed in Klaus et al., 2004 [Nature Biotechnology 22 (2), 225-229]. Briefly the sequences to be transformed are cloned together with a selectable marker gene between flanking sequences homologous to the chloroplast genome. These homologous flanking sequences direct site specific integration into the plastome. Plastidal transformation has been described for many different plant species and an overview is given in Bock (2001) Transgenic plastids in basic research and plant biotechnology. J Mol Biol. 2001 Sep. 21; 312 (3):425-38 or Maliga, P (2003) Progress towards commercialization of plastid transformation technology. Trends Biotechnol. 21, 20-28. Further biotechnological progress has recently been reported in form of marker free plastid transformants, which can be produced by a transient co-integrated maker gene (Klaus et al., 2004, Nature Biotechnology 22(2), 225-229).

[0144] The genetically modified plant cells can be regenerated via all methods with which the skilled worker is familiar. Suitable methods can be found in the abovementioned publications by S. D. Kung and R. Wu, Potrykus or Hofgen and Willmitzer.

[0145] Generally after transformation, plant cells or cell groupings are selected for the presence of one or more markers which are encoded by plant-expressible genes co-transferred with the gene of interest, following which the transformed material is regenerated into a whole plant. To select transformed plants, the plant material obtained in the transformation is, as a rule, subjected to selective conditions so that transformed plants can be distinguished from untransformed plants. For example, the seeds obtained in the above-described manner can be planted and, after an initial growing period, subjected to a suitable selection by spraying. A further possibility consists in growing the seeds, if appropriate after sterilization, on agar plates using a suitable selection agent so that only the transformed seeds can grow into plants. Alternatively, the transformed plants are screened for the presence of a selectable marker such as the ones described above.

[0146] Following DNA transfer and regeneration, putatively transformed plants may also be evaluated, for instance using Southern analysis, for the presence of the gene of interest, copy number and/or genomic organisation. Alternatively or additionally, expression levels of the newly introduced DNA may be monitored using Northern and/or Western analysis, both techniques being well known to persons having ordinary skill in the art.

[0147] The generated transformed plants may be propagated by a variety of means, such as by clonal propagation or classical breeding techniques. For example, a first generation (or T1) transformed plant may be selfed and homozygous second-generation (or T2) transformants selected, and the T2 plants may then further be propagated through classical breeding techniques. The generated transformed organisms may take a variety of forms. For example, they may be chimeras of transformed cells and non-transformed cells; clonal transformants (e.g., all cells transformed to contain the expression cassette); grafts of transformed and untransformed tissues (e.g., in plants, a transformed rootstock grafted to an untransformed scion).

[0148] T-DNA Activation Tagging

[0149] T-DNA activation tagging (Hayashi et al. Science (1992) 1350-1353), involves insertion of T-DNA, usually containing a promoter (may also be a translation enhancer or an intron), in the genomic region of the gene of interest or 10 kb up- or downstream of the coding region of a gene in a configuration such that the promoter directs expression of the targeted gene. Typically, regulation of expression of the targeted gene by its natural promoter is disrupted and the gene falls under the control of the newly introduced promoter. The promoter is typically embedded in a T-DNA. This T-DNA is randomly inserted into the plant genome, for example, through Agrobacterium infection and leads to modified expression of genes near the inserted T-DNA. The resulting transgenic plants show dominant phenotypes due to modified expression of genes close to the introduced promoter.

[0150] Tilling

[0151] The term “TILLING” is an abbreviation of “Targeted Induced Local Lesions In Genomes” and refers to a mutagenesis technology useful to generate and/or identify nucleic acids encoding proteins with modified expression and/or activity. TILLING also allows selection of plants carrying such mutant variants. These mutant variants may exhibit modified expression, either in strength or in location or in timing (if the mutations affect the promoter for example). These mutant variants may exhibit higher activity than that exhibited by the gene in its natural form. TILLING combines high-density mutagenesis with high-throughput screening methods. The steps typically followed in TILLING are: (a) EMS mutagenesis (Redei G P and Koncz C (1992) In Methods in Arabidopsis Research, Koncz C, Chua N H, Schell J, eds. Singapore, World Scientific Publishing Co, pp. 16-82; Feldmann et al., (1994) In Meyerowitz E M, Somerville C R, eds, Arabidopsis. Cold Spring Harbor Laboratory Press, Cold Spring Harbor, N.Y., pp 137-172; Lightner J and Caspar T (1998) In J Martinez-Zapater, J Salinas, eds, Methods on Molecular Biology, Vol. 82. Humana Press, Totowa, N.J., pp 91-104); (b) DNA preparation and pooling of individuals; (c) PCR amplification of a region of interest; (d) denaturation and annealing to allow formation of heteroduplexes; (e) DHPLC, where the presence of a heteroduplex in a pool is detected as an extra peak in the chromatogram; (f) identification of the mutant individual; and (g) sequencing of the mutant PCR product. Methods for TILLING are well known in the art (McCallum et al., (2000) Nat Biotechnol 18: 455-457; reviewed by Stemple (2004) Nat Rev Genet 5(2): 145-50).

[0152] Homologous Recombination

[0153] Homologous recombination allows introduction in a genome of a selected nucleic acid at a defined selected position. Homologous recombination is a standard technology used routinely in biological sciences for lower organisms such as yeast or the moss Physcomilrella. Methods for performing homologous recombination in plants have been described not only for model plants (Offringa et al. (1990) EMBO J 9(10): 3077-84) but also for crop plants, for example rice (Terada et al. (2002) Nat Biotech 20(10): 1030-4; lida and Terada (2004) Curr Opin Biotech 15(2): 132-8), and approaches exist that are generally applicable regardless of the target organism (Miller et al, Nature Biotechnol. 25, 778-785, 2007).

[0154] Yield Related Traits

[0155] Yield related traits are traits or features which are related to plant yield. Yield-related traits may comprise one or more of the following non-limitative list of features: early flowering time, yield, biomass, seed yield, early vigour, greenness index, increased growth rate, improved agronomic traits, such as e.g. improved Water Use Efficiency (WUE), improved Nitrogen Use Efficiency (NUE) or increased tolerance to submergence (which leads to increased yield in rice), etc.

[0156] Yield

[0157] The term “yield” in general means a measurable produce of economic value, typically related to a specified crop, to an area, and to a period of time. Individual plant parts directly contribute to yield based on their number, size and/or weight, or the actual yield is the yield per square meter for a crop and year, which is determined by dividing total production (includes both harvested and appraised production) by planted square meters.

[0158] The terms “yield” of a plant and “plant yield” are used interchangeably herein and are meant to refer to vegetative biomass such as root and/or shoot biomass, to reproductive organs, and/or to propagules such as seeds of that plant.

[0159] Flowers in maize are unisexual; male inflorescences (tassels) originate from the apical stem and female inflorescences (ears) arise from axillary bud apices. The female inflorescence produces pairs of spikelets on the surface of a central axis (cob). Each of the female spikelets encloses two fertile florests, one of whose will usually mature into a maize kernel once fertilized. Hence a yield increase in maize may be manifested as one or more of the following: increase in the number of plants established per square meter, an increase in the number of ears per plant, an increase in the number of rows, number of kernels per row, kernel weight, thousand kernel weight, ear length/diameter, increase in the seed filling rate, which is the number of filled florets (i.e. florets containing seed) divided by the total number of florets and multiplied by 100), among others.

[0160] Inflorescences in rice plants are called panicles. The panicle bears spikelets. The spikelet is the basic unit of the panicles and consists of a pedicel and a floret. The floret is born on the pedicel. A floret includes a flower that is covered by two protective glumes: a larger glume (the lemma) and a shorter glume (the palea). Hence, taking rice as an example, a yield increase may manifest itself as an increase in one or more of the following: number of plants per square meter, number of panicles per plant, panicle length, number of spikelets per panicle, number of flowers (or florets) per panicle, increase in the seed filling rate which is the number of filled florets (i.e. florets containing seeds divided by the total number of floretsand multiplied by 100), increase in thousand kernel weight, among others. In rice, submergence tolerance may also result in increased yield.

[0161] Early Flowering Time

[0162] Plants having an “early flowering time” as used herein are plants which start to flower earlier than control plants. Hence this term refers to plants that show an earlier start of flowering. Flowering time of plants can be assessed by counting the number of days (“time to flower”) between sowing and the emergence of a first inflorescence. The “flowering time” of a plant can for instance be determined using the method as described in WO 2007/093444.

[0163] Early Vigour

[0164] “Early vigour” refers to active healthy well-balanced growth especially during early stages of plant growth, and may result from increased plant fitness due to, for example, the plants being better adapted to their environment (i.e. optimizing the use of energy resources and partitioning between shoot and root). Plants having early vigour also show increased seedling survival and a better establishment of the crop, which often results in highly uniform fields (with the crop growing in uniform manner, i.e. with the majority of plants reaching the various stages of development at substantially the same time), and often better and higher yield. Therefore, early vigour may be determined by measuring various factors, such as thousand kernel weight, percentage germination, percentage emergence, seedling growth, seedling height, root length, root and shoot biomass and many more.

[0165] Increased Growth Rate

[0166] The increased growth rate may be specific to one or more parts of a plant (including seeds), or may be throughout substantially the whole plant. Plants having an increased growth rate may have a shorter life cycle. The life cycle of a plant may be taken to mean the time needed to grow from a dry mature seed up to the stage where the plant has produced dry mature seeds, similar to the starting material. This life cycle may be influenced by factors such as speed of germination, early vigour, growth rate, greenness index, flowering time and speed of seed maturation. The increase in growth rate may take place at one or more stages in the life cycle of a plant or during substantially the whole plant life cycle. Increased growth rate during the early stages in the life cycle of a plant may reflect enhanced vigour. The increase in growth rate may alter the harvest cycle of a plant allowing plants to be sown later and/or harvested sooner than would otherwise be possible (a similar effect may be obtained with earlier flowering time). If the growth rate is sufficiently increased, it may allow for the further sowing of seeds of the same plant species (for example sowing and harvesting of rice plants followed by sowing and harvesting of further rice plants all within one conventional growing period). Similarly, if the growth rate is sufficiently increased, it may allow for the further sowing of seeds of different plants species (for example the sowing and harvesting of corn plants followed by, for example, the sowing and optional harvesting of soybean, potato or any other suitable plant). Harvesting additional times from the same rootstock in the case of some crop plants may also be possible. Altering the harvest cycle of a plant may lead to an increase in annual biomass production per square meter (due to an increase in the number of times (say in a year) that any particular plant may be grown and harvested). An increase in growth rate may also allow for the cultivation of transgenic plants in a wider geographical area than their wild-type counterparts, since the territorial limitations for growing a crop are often determined by adverse environmental conditions either at the time of planting (early season) or at the time of harvesting (late season). Such adverse conditions may be avoided if the harvest cycle is shortened. The growth rate may be determined by deriving various parameters from growth curves, such parameters may be: T-Mid (the time taken for plants to reach 50% of their maximal size) and T-90 (time taken for plants to reach 90% of their maximal size), amongst others.

[0167] Stress Resistance

[0168] An increase in yield and/or growth rate occurs whether the plant is under non-stress conditions or whether the plant is exposed to various stresses compared to control plants. Plants typically respond to exposure to stress by growing more slowly. In conditions of severe stress, the plant may even stop growing altogether. Mild stress on the other hand is defined herein as being any stress to which a plant is exposed which does not result in the plant ceasing to grow altogether without the capacity to resume growth. Mild stress in the sense of the invention leads to a reduction in the growth of the stressed plants of less than 40%, 35%, 30% or 25%, more preferably less than 20% or 15% in comparison to the control plant under non-stress conditions. Due to advances in agricultural practices (irrigation, fertilization, pesticide treatments) severe stresses are not often encountered in cultivated crop plants. As a consequence, the compromised growth induced by mild stress is often an undesirable feature for agriculture. “Mild stresses” are the everyday biotic and/or abiotic (environmental) stresses to which a plant is exposed. Abiotic stresses may be due to drought or excess water, anaerobic stress, salt stress, chemical toxicity, oxidative stress and hot, cold or freezing temperatures.

[0169] “Biotic stresses” are typically those stresses caused by pathogens, such as bacteria, viruses, fungi, nematodes and insects.

[0170] The “abiotic stress” may be an osmotic stress caused by a water stress, e.g. due to drought, salt stress, or freezing stress. Abiotic stress may also be an oxidative stress or a cold stress. “Freezing stress” is intended to refer to stress due to freezing temperatures, i.e. temperatures at which available water molecules freeze and turn into ice. “Cold stress”, also called “chilling stress”, is intended to refer to cold temperatures, e.g. temperatures below 10°, or preferably below 5° C., but at which water molecules do not freeze. As reported in Wang et al. (Planta (2003) 218: 1-14), abiotic stress leads to a series of morphological, physiological, biochemical and molecular changes that adversely affect plant growth and productivity. Drought, salinity, extreme temperatures and oxidative stress are known to be interconnected and may induce growth and cellular damage through similar mechanisms. Rabbani et al. (Plant Physiol (2003) 133: 1755-1767) describes a particularly high degree of “cross talk” between drought stress and high-salinity stress. For example, drought and/or salinisation are manifested primarily as osmotic stress, resulting in the disruption of homeostasis and ion distribution in the cell. Oxidative stress, which frequently accompanies high or low temperature, salinity or drought stress, may cause denaturing of functional and structural proteins. As a consequence, these diverse environmental stresses often activate similar cell signalling pathways and cellular responses, such as the production of stress proteins, up-regulation of anti-oxidants, accumulation of compatible solutes and growth arrest. The term “non-stress” conditions as used herein are those environmental conditions that allow optimal growth of plants. Persons skilled in the art are aware of normal soil conditions and climatic conditions for a given location. Plants with optimal growth conditions, (grown under non-stress conditions) typically yield in increasing order of preference at least 97%, 95%, 92%, 90%, 87%, 85%, 83%, 80%, 77% or 75% of the average production of such plant in a given environment. Average production may be calculated on harvest and/or season basis. Persons skilled in the art are aware of average yield productions of a crop.

[0171] In particular, the methods of the present invention may be performed under non-stress conditions. In an example, the methods of the present invention may be performed under non-stress conditions such as mild drought to give plants having increased yield relative to control plants.

[0172] In another embodiment, the methods of the present invention may be performed under stress conditions.

[0173] In an example, the methods of the present invention may be performed under stress conditions such as drought to give plants having increased yield relative to control plants. In another example, the methods of the present invention may be performed under stress conditions such as nutrient deficiency to give plants having increased yield relative to control plants.

[0174] Nutrient deficiency may result from a lack of nutrients such as nitrogen, phosphates and other phosphorous-containing compounds, potassium, calcium, magnesium, manganese, iron and boron, amongst others.

[0175] In yet another example, the methods of the present invention may be performed under stress conditions such as salt stress to give plants having increased yield relative to control plants. The term salt stress is not restricted to common salt (NaCl), but may be any one or more of: NaCl, KCl, LiCl, MgCl2, CaCl2, amongst others.

[0176] In yet another example, the methods of the present invention may be performed under stress conditions such as cold stress or freezing stress to give plants having increased yield relative to control plants.

[0177] Increase/Improve/Enhance

[0178] The terms “increase”, “improve” or “enhance” are interchangeable and shall mean in the sense of the application at least a 3%, 4%, 5%, 6%, 7%, 8%, 9% or 10%, preferably at least 15% or 20%, more preferably 25%, 30%, 35% or 40% more yield and/or growth in comparison to control plants as defined herein.

[0179] Seed Yield

[0180] Increased seed yield may manifest itself as one or more of the following:
[0181] (a) an increase in seed biomass (total seed weight) which may be on an individual seed basis and/or per plant and/or per square meter;
[0182] (b) increased number of flowers per plant;
[0183] (c) increased number of seeds;
[0184] (d) increased seed filling rate (which is expressed as the ratio between the number of filled florets divided by the total number of florets);
[0185] (e) increased harvest index, which is expressed as a ratio of the yield of harvestable parts, such as seeds, divided by the biomass of aboveground plant parts; and
[0186] (f) increased thousand kernel weight (TKW), which is extrapolated from the number of seeds counted and their total weight. An increased TKW may result from an increased seed size and/or seed weight, and may also result from an increase in embryo and/or endosperm size.

[0187] The terms “filled florets” and “filled seeds” may be considered synonyms.

[0188] An increase in seed yield may also be manifested as an increase in seed size and/or seed volume. Furthermore, an increase in seed yield may also manifest itself as an increase in seed area and/or seed length and/or seed width and/or seed perimeter.

[0189] Greenness Index

[0190] The “greenness index” as used herein is calculated from digital images of plants. For each pixel belonging to the plant object on the image, the ratio of the green value versus the red value (in the RGB model for encoding color) is calculated. The greenness index is expressed as the percentage of pixels for which the green-to-red ratio exceeds a given threshold. Under normal growth conditions, under salt stress growth conditions, and under reduced nutrient availability growth conditions, the greenness index of plants is measured in the last imaging before flowering. In contrast, under drought stress growth conditions, the greenness index of plants is measured in the first imaging after drought.

[0191] Biomass

[0192] The term “biomass” as used herein is intended to refer to the total weight of a plant. Within the definition of biomass, a distinction may be made between the biomass of one or more parts of a plant, which may include any one or more of the following:
[0193] aboveground parts such as but not limited to shoot biomass, seed biomass, leaf biomass, etc.;
[0194] aboveground harvestable parts such as but not limited to shoot biomass, seed biomass, leaf biomass, etc.:
[0195] parts below ground, such as but not limited to root biomass, etc.;
[0196] harvestable parts below ground, such as but not limited to root biomass, tubers, bulbs, etc.;
[0197] vegetative biomass such as root biomass, shoot biomass, etc.;
[0198] reproductive organs; and
[0199] propagules such as seed.

[0200] Marker Assisted Breeding

[0201] Such breeding programmes sometimes require introduction of allelic variation by mutagenic treatment of the plants, using for example EMS mutagenesis; alternatively, the programme may start with a collection of allelic variants of so called “natural” origin caused unintentionally. Identification of allelic variants then takes place, for example, by PCR. This is followed by a step for selection of superior allelic variants of the sequence in question and which give increased yield. Selection is typically carried out by monitoring growth performance of plants containing different allelic variants of the sequence in question. Growth performance may be monitored in a greenhouse or in the field. Further optional steps include crossing plants in which the superior allelic variant was identified with another plant. This could be used, for example, to make a combination of interesting phenotypic features.

[0202] Use as Probes in (Gene Mapping)

[0203] Use of nucleic acids encoding the protein of interest for genetically and physically mapping the genes requires only a nucleic acid sequence of at least 15 nucleotides in length. These nucleic acids may be used as restriction fragment length polymorphism (RFLP) markers. Southern blots (Sambrook J, Fritsch E F and Maniatis T (1989) Molecular Cloning, A Laboratory Manual) of restriction-digested plant genomic DNA may be probed with the nucleic acids encoding the protein of interest. The resulting banding patterns may then be subjected to genetic analyses using computer programs such as MapMaker (Lander et al. (1987) Genomics 1: 174-181) in order to construct a genetic map. In addition, the nucleic acids may be used to probe Southern blots containing restriction endonuclease-treated genomic DNAs of a set of individuals representing parent and progeny of a defined genetic cross. Segregation of the DNA polymorphisms is noted and used to calculate the position of the nucleic acid encoding the protein of interest in the genetic map previously obtained using this population (Botstein et al. (1980) Am. J. Hum. Genet. 32:314-331).

[0204] The production and use of plant gene-derived probes for use in genetic mapping is described in Bernatzky and Tanksley (1986) Plant Mol. Biol. Reporter 4: 37-41. Numerous publications describe genetic mapping of specific cDNA clones using the methodology outlined above or variations thereof. For example, F2 intercross populations, backcross populations, randomly mated populations, near isogenic lines, and other sets of individuals may be used for mapping. Such methodologies are well known to those skilled in the art.

[0205] The nucleic acid probes may also be used for physical mapping (i.e., placement of sequences on physical maps; see Hoheisel et al. In: Non-mammalian Genomic Analysis: A Practical Guide, Academic press 1996, pp. 319-346, and references cited therein).

[0206] In another embodiment, the nucleic acid probes may be used in direct fluorescence in situ hybridisation (FISH) mapping (Trask (1991) Trends Genet. 7:149-154). Although current methods of FISH mapping favour use of large clones (several kb to several hundred kb; see Laan et al. (1995) Genome Res. 5:13-20), improvements in sensitivity may allow performance of FISH mapping using shorter probes.

[0207] A variety of nucleic acid amplification-based methods for genetic and physical mapping may be carried out using the nucleic acids. Examples include allele-specific amplification (Kazazian (1989) J. Lab. Clin. Med 11:95-96), polymorphism of PCR-amplified fragments (CAPS; Sheffield et al. (1993) Genomics 16:325-332), allele-specific ligation (Landegren et al. (1988) Science 241:1077-1080), nucleotide extension reactions (Sokolov (1990) Nucleic Acid Res. 18:3671), Radiation Hybrid Mapping (Walter et al. (1997) Nat. Genet. 7:22-28) and Happy Mapping (Dear and Cook (1989) Nucleic Acid Res. 17:6795-6807). For these methods, the sequence of a nucleic acid is used to design and produce primer pairs for use in the amplification reaction or in primer extension reactions. The design of such primers is well known to those skilled in the art. In methods employing PCR-based genetic mapping, it may be necessary to identify DNA sequence differences between the parents of the mapping cross in the region corresponding to the instant nucleic acid sequence. This, however, is generally not necessary for mapping methods.

[0208] Plant

[0209] The term “plant” as used herein encompasses whole plants, ancestors and progeny of the plants and plant parts, including seeds, shoots, stems, leaves, roots (including tubers), flowers, and tissues and organs, wherein each of the aforementioned comprise the gene/nucleic acid of interest. The term “plant” also encompasses plant cells, suspension cultures, callus tissue, embryos, meristematic regions, gametophytes, sporophytes, pollen and microspores, again wherein each of the aforementioned comprises the gene/nucleic acid of interest.

[0210] Plants that are particularly useful in the methods of the invention include all plants which belong to the superfamily Viridiplantae, in particular monocotyledonous and dicotyledonous plants including fodder or forage legumes, ornamental plants, food crops, trees or shrubs selected from the list comprising Acer spp., Actinidia spp., Abelmoschus spp., Agave sisalana, Agropyron spp., Agrostis stolonifera, Allium spp., Amaranthus spp., Ammophila arenaria, Ananas comosus, Annona spp., Apium graveolens, Arachis spp, Artocarpus spp., Asparagus officinalis, Avena spp. (e.g. Avena sativa, Avena fatua, Avena byzantina, Avena fatua var. sativa, Avena hybrida), A verrhoa carambola, Bambusa sp., Benincasa hispida, Bertholletia excelsea, Beta vulgaris, Brassica spp. (e.g. Brassica napus, Brassica raga ssp. [canola, oilseed rape, turnip rape]), Cadaba farinosa, Camellia sinensis, Canna indica, Cannabis sativa, Capsicum spp., Carex elata, Carica papaya, Carissa macrocarpa, Carya spp., Carthamus tinctorius, Castanea spp., Ceiba pentandra, Cichorium endivia, Cinnamomum spp., Citrullus lanatus, Citrus spp., Cocos spp., Coffea spp., Colocasia esculenta, Cola spp., Corchorus sp., Coriandrum sativum, Corylus spp., Crataegus spp., Crocus sativus, Cucurbita spp., Cucumis spp., Cynara spp., Daucus carota, Desmodium spp., Dimocarpus longan, Dioscorea spp., Diospyros spp., Echinochloa spp., Elaeis (e.g. Elaeis guineensis, Elaeis oleifera), Eleusine coracana, Eragrostis tef, Erianthus sp., Eriobotrya japonica, Eucalyptus sp., Eugenia unitlora, Fagopyrum spp., Fagus spp., Festuca arundinacea, Ficus carica, Fortunella spp., Fragaria spp., Ginkgo biloba, Glycine spp. (e.g. Glycine max, Soja hispida or Soja max), Gossypium hirsutum, Helianthus spp. (e.g. Helianthus annuus), Hemerocallis fulva, Hibiscus spp., Hordeum spp. (e.g. Hordeum vulgare), Ipomoea batatas, Juglans spp., Lactuca sativa, Lathyrus spp., Lens culinaris, Linum usitatissimum, Litchi chinensis, Lotus spp., Luffa acutangula, Lupinus spp., Luzula sylvatica, Lycopersicon spp. (e.g. Lycopersicon esculentum, Lycopersicon lycopersicum, Lycopersicon pyriforme), Macrotyloma spp., Malus spp., Malpighia emarginata, Mammea americana, Mangifera indica, Manihot spp., Manilkara zapota, Medicago sativa, Melllotus spp., Mentha spp., Miscanthus sinensis, Momordica spp., Morus nigra, Musa spp., Alicotiana spp., Olea spp., Opuntia spp., Ornithopus spp., Oryza spp. (e.g. Oryza sativa, Oryza latifolia), Panicum miliaceum, Panicum virgatum, Passiflora edulis, Pastinaca sativa, Pennisetum sp., Persea spp., Petroselinum crispum, Phalaris arundinacea, Phaseolus spp., Phleum pratense, Phoenix spp., Phragmites australis, Physalis spp., Pinus spp., Pistacia vera, Pisum spp., Poa spp., Populus spp., Prosopis spp., Prunus spp., Psidium spp., Punica granatum, Pyrus communis, Quercus spp., Raphanus sativus, Rheum rhabarbarum, Ribes spp., Ricinus communis, Rubus spp., Saccharum spp., Salix sp., Sambucus spp., Secale cereale, Sesamum spp., Sinapis sp., Solanum spp. (e.g. Solanum tuberosum, Solanum integrifolium or Solanum lycopersicum), Sorghum bicolor, Spinacia spp., Syzygium spp., Tagetes spp., Tamarindus indica, Theobroma cacao, Trifolium spp., Tripsacum dactyloides, Triticosecale rimpaui, Triticum spp. (e.g. Triticum aestivum, Triticum durum, Triticum turgidum, Triticum hybernum, Triticum macha, Triticum sativum, Triticum monococcum or Triticum vulgare), Tropaeolum minus, Tropaeolum majus, Vaccinium spp., Vida spp., Vigna spp., Viola odorata, Vitis spp., Zea mays, Zizania palustris, Ziziphus spp., amongst others.

[0211] Control Plant(s)

[0212] The choice of suitable control plants is a routine part of an experimental setup and may include corresponding wild type plants or corresponding plants without the gene of interest. The control plant is typically of the same plant species or even of the same variety as the plant to be assessed. The control plant may also be a nullizygote of the plant to be assessed. Nullizygotes (or null control plants) are individuals missing the transgene by segregation. Further, control plants are grown under equal growing conditions to the growing conditions of the plants of the invention, i.e. in the vicinity of, and simultaneously with, the plants of the invention. A “control plant” as used herein refers not only to whole plants, but also to plant parts, including seeds and seed parts.

### DETAILED DESCRIPTION OF THE INVENTION

[0213] Surprisingly, it has now been found that modulating expression in a plant of a nucleic acid encoding a WIL polypeptide or a SAWADEE-like polypeptide or a POZ-like polypeptide gives plants having enhanced yield-related traits relative to control plants.

[0214] According to a first embodiment, the present invention provides a method for enhancing yield-related traits in plants relative to control plants, comprising modulating expression in a plant of a nucleic acid encoding a WIL polypeptide or a SAWADEE-like polypeptide or a POZ-like polypeptide and optionally selecting for plants having enhanced yield-related traits. According to another embodiment, the present invention provides a method for producing plants having enhancing yield-related traits relative to control plants, wherein said method comprises the steps of modulating expression in said plant of a nucleic acid encoding a WIL polypeptide or a SAWADEE-like polypeptide or a POZ-like polypeptide as described herein and optionally selecting for plants having enhanced yield-related traits.

[0215] A preferred method for modulating, preferably increasing, expression of a nucleic acid encoding a WIL polypeptide or a SAWADEE-like polypeptide or a POZ-like polypeptide is by introducing and expressing in a plant a nucleic acid encoding a WIL polypeptide or a SAWADEE-like polypeptide or a POZ-like polypeptide.

[0216] Any reference hereinafter to a “protein useful in the methods of the invention” is taken to mean a WIL polypeptide or a SAWADEE-like polypeptide or a POZ-like polypeptide as defined herein. Any reference hereinafter to a “nucleic acid useful in the methods of the invention” is taken to mean a nucleic acid capable of encoding such a WIL polypeptide or a SAWADEE-like polypeptide or a POZ-like polypeptide. The nucleic acid to be introduced into a plant (and therefore useful in performing the methods of the invention) is any nucleic acid encoding the type of protein which will now be described, hereafter also named “WIL nucleic acid” or “WIL gene” or “SAWADEE-like nucleic acid” or “SAWADEE-like gene” or “POZ-like nucleic acid” or “POZ-like gene”.

[0217] A “WIL polypeptide” as defined herein refers to any polypeptide comprising one or more of the following MEME motifs:

(i) Motif 1:
(SEQ ID NO: 317)
IT[RQ][VL]REYFNTS[VL]TV[RT][DR][VLF]
(ii) Motif 2:
(SEQ ID NO: 318)
[PR][RS][AIV][YS]W[VI]H[AV]W[AT]V[ET][GD]G[RGI]
(iii) Motif 3:
(SEQ ID NO: 319)
[DS][DN][DR][DVA][DG][RK]S[VL]PGLVLA[IL].

[0218] In a more preferred embodiment, the WIL polypeptide comprises in increasing order of preference at least 2 or all of the motifs 1 to 3.

[0219] Motifs 1 to 3 were derived using the MEME algorithm (Bailey and Elkan, Proceedings of the Second International Conference on Intelligent Systems for Molecular Biology, pp. 28-36, AAAI Press, Menlo Park, Calif., 1994). At each position within a MEME motif, the residues are shown that are present in the query set of sequences with a frequency higher than 0.2. Residues within square brackets represent alternatives.

[0220] In an even more preferred embodiment, the WIL polypeptide comprises an Interpro accession IPR009798 WI12 domain, corresponding to PFAM accession number PF07107 WI12 domain.

[0221] The term “WIL” or “WIL polypeptide” as used herein also intends to include homologues as defined hereunder of “WIL polypeptide”.

[0222] Additionally or alternatively, the homologue of a WIL protein has in increasing order of preference at least 25%, 26%, 27%, 28%, 29%, 30%, 31%, 32%, 33%, 34%, 35%, 36%, 37%, 38%, 39%, 40%, 41%, 42%, 43%, 44%, 45%, 46%, 47%, 48%, 49%, 50%, 51%, 52%, 53%, 54%, 55%, 56%, 57%, 58%, 59%, 60%, 61%, 62%, 63%, 64%, 65%, 66%, 67%, 68%, 69%, 70%, 71%, 72%, 73%, 74%, 75%, 76%, 77%, 78%, 79%, 80%, 81%, 82%, 83%, 84%, 85%, 86%, 87%, 88%, 89%, 90%, 91%, 92%, 93%, 94%, 95%, 96%, 97%, 98%, or 99% overall sequence identity to the amino acid represented by SEQ ID NO: 2, provided that the homologous protein comprises any one or more of the conserved motifs as outlined above.

[0223] The overall sequence identity is determined using a global alignment algorithm, such as the Needleman Wunsch algorithm in the program GAP (GCG Wisconsin Package, Accelrys), preferably with default parameters and preferably with sequences of mature proteins (i.e. without taking into account secretion signals or transit peptides). Compared to overall sequence identity, the sequence identity will generally be higher when only conserved domains or motifs are considered.

[0224] Preferably the motifs in a WIL polypeptide have, in increasing order of preference, at least 70%, 71%, 72%, 73%, 74%, 75%, 76%, 77%, 78%, 79%, 80%, 81%, 82%, 83%, 84%, 85%, 86%, 87%, 88%, 89%, 90%, 91%, 92%, 93%, 94%, 95%, 96%, 97%, 98%, or 99% sequence identity to any one or more of the motifs represented by SEQ ID NO: 317 to SEQ ID NO: 319 (Motifs 1 to 3).

[0225] In another preferred embodiment a method is provided wherein said WIL polypeptide comprises a conserved domain with at least 70%, 71%, 72%, 73%, 74%, 75%, 76%, 77%, 78%, 79%, 80%, 81%, 82%, 83%, 84%, 85%, 86%, 87%, 88%, 89%, 90%, 91%, 92%, 93%, 94%, 95%, 96%, 97%, 98%, or 99% sequence identity to a conserved domain of amino acid coordinates 60 to 177 of SEQ ID NO:2.

[0226] The terms “domain”, “signature” and “motif” are defined in the “definitions” section herein.

[0227] In addition, WIL polypeptides, when expressed in transgenic plants such as e.g. rice according to the methods of the present invention as outlined in Examples 6 and 8, give plants having increased yield related traits, in particular in particular increased yield, more in particular increased seed yield, even more in particular increased fillrate, increased weight of seeds and increased harvest index, relative to control plants.

[0228] The present invention is illustrated by transforming plants with the nucleic acid sequence represented by SEQ ID NO: 1, encoding the polypeptide sequence of SEQ ID NO: 2. However, performance of the invention is not restricted to these sequences; the methods of the invention may advantageously be performed using any WIL-encoding nucleic acid or WIL polypeptide as defined herein.

[0229] Examples of nucleic acids encoding WIL polypeptides are given in Table A1 of the Examples section herein. Such nucleic acids are useful in performing the methods of the invention. The amino acid sequences given in Table A1 of the Examples section are example sequences of orthologues and paralogues of the WIL polypeptide represented by SEQ ID NO: 2, the terms “orthologues” and “paralogues” being as defined herein. Further orthologues and paralogues may readily be identified by performing a so-called reciprocal blast search as described in the definitions section; where the query sequence is SEQ ID NO: 1 or SEQ ID NO: 2, the second BLAST (back-BLAST) would be against rice sequences.

[0230] The invention also provides hitherto unknown WIL-encoding nucleic acids and WIL polypeptides useful for conferring enhanced yield-related traits in plants relative to control plants.

[0231] According to a further embodiment of the present invention, there is therefore provided an isolated nucleic acid molecule selected from:
[0232] (i) a nucleic acid represented by SEQ ID NO: 3;
[0233] (ii) the complement of a nucleic acid represented by SEQ ID NO: 3;
[0234] (iii) a nucleic acid encoding a WIL polypeptide having in increasing order of preference at least 50%, 51%, 52%, 53%, 54%, 55%, 56%, 57%, 58%, 59%, 60%, 61%, 62%, 63%, 64%, 65%, 66%, 67%, 68%, 69%, 70%, 71%, 72%, 73%, 74%, 75%, 76%, 77%, 78%, 79%, 80%, 81%, 82%, 83%, 84%, 85%, 86%, 87%, 88%, 89%, 90%, 91%, 92%, 93%, 94%, 95%, 96%, 97%, 98%, or 99% sequence identity to the amino acid sequence represented by SEQ ID NO: 4, and additionally or alternatively comprising one or more motifs having in increasing order of preference at least 50%, 55%, 60%, 65%, 70%, 75%, 80%, 85%, 90%, 95%, 96%, 97%, 98%, 99% or more sequence identity to any one or more of the motifs given in SEQ ID NO: 317 to SEQ ID NO: 319, and further preferably conferring enhanced yield-related traits relative to control plants.
[0235] (iv) a nucleic acid molecule which hybridizes with a nucleic acid molecule of (i) to (iii) under high stringency hybridization conditions and preferably confers enhanced yield-related traits relative to control plants.

[0236] According to a further embodiment of the present invention, there is also provided an isolated polypeptide selected from:
[0237] (i) an amino acid sequence represented by SEQ ID NO: 4;
[0238] (ii) an amino acid sequence having, in increasing order of preference, at least 50%, 51%, 52%, 53%, 54%, 55%, 56%, 57%, 58%, 59%, 60%, 61%, 62%, 63%, 64%, 65%, 66%, 67%, 68%, 69%, 70%, 71%, 72%, 73%, 74%, 75%, 76%, 77%, 78%, 79%, 80%, 81%, 82%, 83%, 84%, 85%, 86%, 87%, 88%, 89%, 90%, 91%, 92%, 93%, 94%, 95%, 96%, 97%, 98%, or 99% sequence identity to the amino acid sequence represented by SEQ ID NO: 4, and additionally or alternatively comprising one or more motifs having in increasing order of preference at least 50%, 55%, 60%, 65%, 70%, 75%, 80%, 85%, 90%, 95%, 96%, 97%, 98%, 99% or more sequence identity to any one or more of the motifs given in SEQ ID NO: 317 to SEQ ID NO: 319, and further preferably conferring enhanced yield-related traits relative to control plants;
[0239] (iii) derivatives of any of the amino acid sequences given in (i) or (ii) above.

[0240] A “SAWADEE-like polypeptide” as defined herein refers to any polypeptide comprising the following:
[0241] 1. A homeodomain; and
[0242] 2. A SAWADEE domain; and
[0243] 3. A nuclear localisation signal (NLS).

[0244] Domain I: Homeodomain (SEQ ID NO: 438)

[0245] NGGPSFRFMQYEVTEMDAILQEHH NMMPAREVLVSLAEKFSESSERKGKIQVQMKQVWN WFQNRRYAIRAKS, or a domain having in increasing order of preference at least 60%, 61%, 62%, 63%, 64%, 65%, 66%, 67%, 68%, 69%, 70%, 71%, 72%, 73%, 74%, 75%, 76%, 77%, 78%, 79%, 80%, 81%, 82%, 83%, 84%, 85%, 86%, 87%, 88%, 89%, 90%, 91%, 92%, 93%, 94%, 95%, 96%, 97%, 98%, or 99% sequence identity to Domain I.

[0246] The homeodomain binds DNA through a helix-turn-helix (HTH) structure. The HTH motif is characterised by two alpha-helices, which make intimate contacts with the DNA and are joined by a short turn. The second helix binds to DNA via a number of hydrogen bonds and hydrophobic interactions, which occur between specific side chains and the exposed bases and thymine methyl groups within the major groove of the DNA. The first helix helps to stabilise the structure.

[0247] The homeodomain further falls under Inter Pro accession number IPRO01356.

[0248] Domain II: SAWADEE domain

[0249] The SAWADEE domain is made up of each of Motifs 4, 5 and 6 as described below and comprises the conserved cysteine and histidine residues indicated below or as indicated in the alignment of FIG. 3.

[0250] Motif 4 (SEQ ID NO: 439)

[0251] [PV]GDL[IV]LCFQEGK[ED]QALY[FY]DAHVL[DE][IA]QR[RK][RL]HD[VI]RGCRC[RI]F[LV]VR YDHDQSEE, or a motif having in increasing order of preference at least 60%, 61%, 62%, 63%, 64%, 65%, 66%, 67%, 68%, 69%, 70%, 71%, 72%, 73%, 74%, 75%, 76%, 77%, 78%, 79%, 80%, 81%, 82%, 83%, 84%, 85%, 86%, 87%, 88%, 89%, 90%, 91%, 92%, 93%, 94%, 95%, 96%, 97%, 98%, or 99% sequence identity to the Motif 4; and

[0252] Motif 5 (SEQ ID NO: 440)

[0253] EV[RL]VRF[AS]GFG[AP]EEDEW[VI]NV[RK][KR], or a motif having in increasing order of preference at least 60%, 61%, 62%, 63%, 64%, 65%, 66%, 67%, 68%, 69%, 70%, 71%, 72%, 73%, 74%, 75%, 76%, 77%, 78%, 79%, 80%, 81%, 82%, 83%, 84%, 85%, 86%, 87%, 88%, 89%, 90%, 91%, 92%, 93%, 94%, 95%, 96%, 97%, 98%, or 99% sequence identity to the Motif 5; and

[0254] Motif 6 (SEQ ID NO: 441)

[0255] [RK]DGAWYDVA[AST]FL[ST][HY]R, or a motif having in increasing order of preference at least 60%, 61%, 62%, 63%, 64%, 65%, 66%, 67%, 68%, 69%, 70%, 71%, 72%, 73%, 74%, 75%, 76%, 77%, 78%, 79%, 80%, 81%, 82%, 83%, 84%, 85%, 86%, 87%, 88%, 89%, 90%, 91%, 92%, 93%, 94%, 95%, 96%, 97%, 98%, or 99% sequence identity to the Motif 6.

[0256] Preferably, the SAWADEE domain is represented by the following sequence or by a sequence having in increasing order of preference at least 60%, 61%, 62%, 63%, 64%, 65%, 66%, 67%, 68%, 69%, 70%, 71%, 72%, 73%, 74%, 75%, 76%, 77%, 78%, 79%, 80%, 81%, 82%, 83%, 84%, 85%, 86%, 87%, 88%, 89%, 90%, 91%, 92%, 93%, 94%, 95%, 96%, 97%, 98%, or 99% identity thereto: FEAKSGRDGAWYDVGTFQSHRYLDKGDPEVLVRFA GFG PDEDEWLNVCKHVRQRSLPCEASECVAVLPG DLILCFQEGKDQALYFDAHVLDAQR RRHDVRGCRCRFLVRYDHDQSEEIVPLRKICRRPETDY (SEQ ID NO: 442)

[0257] NLS

[0258] A nuclear localisation signal or NLS typically consists of one or more short sequences of positively charged lysines or arginines which serve to target the protein to the nucleus. The NLS may be as shown in the alignment of FIG. 3.

[0259] The term “SAWADEE-like” or “SAWADEE-like polypeptide” as used herein also therefore includes homologues of a “SAWADEE-like polypeptide”.

[0260] Motifs 4, 5 and 6 above are so-called MEME motifs and represent the sequence that is present in 80% of the query set of proteins. At each position within a MEME motif, the residues are shown that are present in the query set of sequences with a frequency higher than 0.2. Residues within square brackets represent alternatives. For the MEME algorithm see Bailey and Elkan (Proceedings of the Second International Conference on Intelligent Systems for Molecular Biology, pp. 28-36, AAAI Press, Menlo Park, Calif., 1994.)

[0261] Additionally or alternatively, the SAWADEE-like polypeptide has in increasing order of preference at least 25%, 26%, 27%, 28%, 29%, 30%, 31%, 32%, 33%, 34%, 35%, 36%, 37%, 38%, 39%, 40%, 41%, 42%, 43%, 44%, 45%, 46%, 47%, 48%, 49%, 50%, 51%, 52%, 53%, 54%, 55%, 56%, 57%, 58%, 59%, 60%, 61%, 62%, 63%, 64%, 65%, 66%, 67%, 68%, 69%, 70%, 71%, 72%, 73%, 74%, 75%, 76%, 77%, 78%, 79%, 80%, 81%, 82%, 83%, 84%, 85%, 86%, 87%, 88%, 89%, 90%, 91%, 92%, 93%, 94%, 95%, 96%, 97%, 98%, or 99% overall sequence identity to the amino acid represented by SEQ ID NO: 325, and comprises (i) a homeodomain, (ii) a SAWADEE domain and (iii) an NLS, each as defined herein.

[0262] Overall sequence identity is determined using a global alignment algorithm, such as the Needleman Wunsch algorithm in the program GAP (GCG Wisconsin Package, Accelrys), preferably with default parameters and preferably with sequences of mature proteins (i.e. without taking into account secretion signals or transit peptides). Compared to overall sequence identity, the sequence identity will generally be higher when only conserved domains or motifs are considered.

[0263] The terms “domain”, “signature” and “motif” are defined in the “definitions” section herein.

[0264] Furthermore, the SAWADEE-like polypeptide sequence when used in the construction of a phylogenetic tree, such as the one depicted in FIG. 4, clusters with the group of SAWADEE-like polypeptides rather than any other homeobox proteins.

[0265] In addition, SAWADEE-like polypeptides, when expressed in transgenic plants such as rice according to the methods of the present invention, and as further detailed in the Examples section herein, give plants having increased yield-related traits, such as increased seed yield, increased thousand kernel weight, increased harvest index, increased number of filled seeds etc.

[0266] The present invention is illustrated by transforming plants with the nucleic acid sequence represented by SEQ ID NO: 324, encoding the polypeptide sequence of SEQ ID NO: 325. However, performance of the invention is not restricted to these sequences; the methods of the invention may advantageously be performed using any SAWADEE-like encoding nucleic acid or SAWADEE-like polypeptide as defined herein.

[0267] Examples of nucleic acids encoding SAWADEE-like polypeptides are given in Table A2 of the Examples section herein. Such nucleic acids are useful in performing the methods of the invention. The amino acid sequences given in Table A2 of the Examples section are example sequences of orthologues and paralogues of the SAWADEE-like polypeptide represented by SEQ ID NO: 325, the terms “orthologues” and “paralogues” being as defined herein. Further orthologues and paralogues may readily be identified by performing a so-called reciprocal blast search as described in the definitions section; where the query sequence is SEQ ID NO: 324 or SEQ ID NO: 325, the second BLAST (back-BLAST) would be against poplar sequences.

[0268] A “POZ-like polypeptide” as defined herein refers to any polypeptide comprising a BTB/POZ domain (PFam PF00651), but not comprising a MATH domain (Pfam PF00917) or a zf-TAZ domain (PFam PF02135), as described in Figueroa et al. (Plant Cell 17: 1180-1195, 2005). Preferably the POZ-like protein comprises one or more of the following motifs 7 to 9:

Motif 7
(SEQ ID NO: 543)
AH[RK]A[VI]L[AS]A[RTS]SPVF[REH]SMF[SL]H[DN]L[KR]
EKE[SL]S[IT][IV][NDH]I[SE]DMS[TL]E[SA]C[QTM]A
[LF]L[SN]Y[LI]YG[NT]I
Motif 2
(SEQ ID NO: 544)
[DE][LF][WL]KHRLALL[GR]AA[DN]KYDI[VG]DLK[END]AC
[EH]ESLLEDI[DN][ST][KG]NVLERLQEAWLYQL
Motif 9
(SEQ ID NO: 545)
[KR]VET[ILT]SRLAQWRI[DE]N[LF][GT][PAS][SC][TS]Y
[RK][KR]SDPFK[IV]G[IL]WNW[HY]LS[VI]E[KR]N

[0269] Motifs 7 to 9 are representative for POZ-like proteins from Classes 1, 2 and 3 as shown in FIG. 9. More preferably the POZ-like protein comprises one or more of the following motifs 10 to 12:

Motif 10
(SEQ ID NO: 546)
AH[RK]A[VI]L[AS]A[RTS]SPVF[RH]SMF[SL]H[DN]L[KR]EKE
[LS]ST[IV][ND]I[SE]DMS[LTI][ED][AS]C[QT]A[LF]L[SN]
Y[IL]YG[NT]I
Motif 11
(SEQ ID NO: 547)
[DE][LF][LW]KHRLALL[GR]NAA[DN]KYDI[VG]DLK[END]AC
[EH]ESLLEDI[DN][ST][KG]NVLERLQ[EN]AWLY[QR]L
Motif 12
(SEQ ID NO: 548)
[RK]VET[ILT][SAP]RLAQW[RK][IV][DE]N[LF][GTA][SAP]
[SC][TS]Y[RK][KR]SDPF[KR][IV]G[IL]WNW[HY]LS[VI]E
[KR]N

[0270] Motifs 10 to 12 are representative for POZ-like proteins from Classes 2 and 3 as shown in FIG. 9. Most preferably the POZ-like protein comprises one or more of the following motifs 13 to 15:

Motif 13
(SEQ ID NO: 549)
ET[LI][SA]RLAQW[RK]I[DE][NS][FL][TG][AP][SC][ST]Y
[KR][RK]SDPFK[LVI]GIWNW[HY]LS[IV]E[KR]NRYLY[IV]
[RH]LFPEP
Motif 14
(SEQ ID NO: 550)
K[ND][AL]CEESLLEDINSGNVLERL[QN]EAWLYQLx[KR]LKKGCL
[MT]YLFDFGKIYDVR
Motif 15
(SEQ ID NO: 551)
SPVF[HE]SMFLH[DN]L[RK]EKESS[TI]I[ND]IEDMS[LTV]ESC
[TM]ALLSY[LI]YGTIKQED[LF]WKHR

[0271] Motifs 13 to 15 are representative for POZ-like proteins from Class 3 as shown in FIG. 9.

[0272] The term “POZ-like” or “POZ-like polypeptide” as used herein also intends to include homologues as defined hereunder of “POZ-like polypeptide”.

[0273] Motifs 7 to 15 were derived using the MEME algorithm (Bailey and Elkan, Proceedings of the Second International Conference on Intelligent Systems for Molecular Biology, pp. 28-36, AAAI Press, Menlo Park, Calif., 1994). At each position within a MEME motif, the residues are shown that are present in the query set of sequences with a frequency higher than 0.2. Residues within square brackets represent alternatives.

[0274] More preferably, the POZ-like polypeptide comprises in increasing order of preference, at least 2, at least 3, at least 4, at least 5, at least 6 of the above-mentioned motifs.

[0275] Additionally or alternatively, the homologue of a POZ-like protein has in increasing order of preference at least 25%, 26%, 27%, 28%, 29%, 30%, 31%, 32%, 33%, 34%, 35%, 36%, 37%, 38%, 39%, 40%, 41%, 42%, 43%, 44%, 45%, 46%, 47%, 48%, 49%, 50%, 51%, 52%, 53%, 54%, 55%, 56%, 57%, 58%, 59%, 60%, 61%, 62%, 63%, 64%, 65%, 66%, 67%, 68%, 69%, 70%, 71%, 72%, 73%, 74%, 75%, 76%, 77%, 78%, 79%, 80%, 81%, 82%, 83%, 84%, 85%, 86%, 87%, 88%, 89%, 90%, 91%, 92%, 93%, 94%, 95%, 96%, 97%, 98%, or 99% overall sequence identity to the amino acid represented by SEQ ID NO: 448, provided that the homologous protein comprises any one or more of the conserved motifs as outlined above. The overall sequence identity is determined using a global alignment algorithm, such as the Needleman Wunsch algorithm in the program GAP (GCG Wisconsin Package, Accelrys), preferably with default parameters and preferably with sequences of mature proteins (i.e. without taking into account secretion signals or transit peptides). Compared to overall sequence identity, the sequence identity will generally be higher when only conserved domains or motifs are considered. Preferably the motifs in a POZ-like polypeptide have, in increasing order of preference, at least 70%, 71%, 72%, 73%, 74%, 75%, 76%, 77%, 78%, 79%, 80%, 81%, 82%, 83%, 84%, 85%, 86%, 87%, 88%, 89%, 90%, 91%, 92%, 93%, 94%, 95%, 96%, 97%, 98%, or 99% sequence identity to any one or more of the motifs represented by SEQ ID NO: 543 to SEQ ID NO: 551 (Motifs 7 to 15).

[0276] In other words, in another embodiment a method is provided wherein said POZ-like polypeptide comprises a conserved domain (or motif) with at least 70%, 71%, 72%, 73%, 74%, 75%, 76%, 77%, 78%, 79%, 80%, 81%, 82%, 83%, 84%, 85%, 86%, 87%, 88%, 89%, 90%, 91%, 92%, 93%, 94%, 95%, 96%, 97%, 98%, or 99% sequence identity to the conserved domain starting with amino acid 155 up to amino acid 259 in SEQ ID NO: 448.

[0277] The terms “domain”, “signature” and “motif” are defined in the “definitions” section herein.

[0278] Preferably, the polypeptide sequence which when used in the construction of a phylogenetic tree, such as the one depicted in FIG. 9, clusters within the group of POZ-like polypeptides comprising the amino acid sequence represented by SEQ ID NO: 448 rather than with any other group, preferably it clusters within Class 2 or Class 3 as shown in FIG. 9, most preferably it clusters within Class 3 of POZ-like polypeptides.

[0279] Furthermore, POZ-like polypeptides (at least in their native form) typically interact with other proteins, in particular with CUL3 proteins. Tools and techniques for measuring protein-protein, such as yeast two hybrid assays are well known in the art. Further details are provided in Example 7.

[0280] In addition, POZ-like polypeptides, when expressed in rice according to the methods of the present invention as outlined in Examples 6 and 8, give plants having increased yield related traits, in particular increased biomass and/or increased number of seeds.

[0281] The present invention is illustrated by transforming plants with the nucleic acid sequence represented by SEQ ID NO: 447, encoding the polypeptide sequence of SEQ ID NO: 448. However, performance of the invention is not restricted to these sequences; the methods of the invention may advantageously be performed using any POZ-like-encoding nucleic acid or POZ-like polypeptide as defined herein.

[0282] Examples of nucleic acids encoding POZ-like polypeptides are given in Table A3 of the Examples section herein. Such nucleic acids are useful in performing the methods of the invention. The amino acid sequences given in Table A3 of the Examples section are example sequences of orthologues and paralogues of the POZ-like polypeptide represented by SEQ ID NO: 448, the terms “orthologues” and “paralogues” being as defined herein.

[0283] Further orthologues and paralogues may readily be identified by performing a so-called reciprocal blast search as described in the definitions section; where the query sequence is SEQ ID NO: 447 or SEQ ID NO: 448, the second BLAST (back-BLAST) would be against tomato (Lycopersicon esculentum) sequences.

[0284] The invention also provides hitherto unknown POZ-like-encoding nucleic acids and POZ-like polypeptides useful for conferring enhanced yield-related traits in plants relative to control plants.

[0285] According to a further embodiment of the present invention, there is therefore provided an isolated nucleic acid molecule selected from:
[0286] (i) a nucleic acid represented by any of SEQ ID NO: 457, SEQ ID NO: 523, SEQ ID NO: 529, and SEQ ID NO: 535;
[0287] (ii) the complement of a nucleic acid represented by SEQ ID NO: 457, SEQ ID NO: 523, SEQ ID NO: 529, and SEQ ID NO: 535;
[0288] (iii) a nucleic acid encoding a POZ-like polypeptide having in increasing order of preference at least 50%, 51%, 52%, 53%, 54%, 55%, 56%, 57%, 58%, 59%, 60%, 61%, 62%, 63%, 64%, 65%, 66%, 67%, 68%, 69%, 70%, 71%, 72%, 73%, 74%, 75%, 76%, 77%, 78%, 79%, 80%, 81%, 82%, 83%, 84%, 85%, 86%, 87%, 88%, 89%, 90%, 91%, 92%, 93%, 94%, 95%, 96%, 97%, 98%, or 99% sequence identity to any of the amino acid sequences represented by SEQ ID NO: 458, SEQ ID NO: 524, SEQ ID NO: 530, and SEQ ID NO: 536, and additionally or alternatively comprising one or more motifs having in increasing order of preference at least 50%, 55%, 60%, 65%, 70%, 75%, 80%, 85%, 90%, 95%, 96%, 97%, 98%, 99% or more sequence identity to any one or more of the motifs given in SEQ ID NO: 543 to SEQ ID NO: 551, and further preferably conferring enhanced yield-related traits relative to control plants.
[0289] (iv) a nucleic acid molecule which hybridizes with a nucleic acid molecule of (i) to (iii) under high stringency hybridization conditions and preferably confers enhanced yield-related traits relative to control plants.

[0290] According to a further embodiment of the present invention, there is also provided an isolated polypeptide selected from:
[0291] (i) an amino acid sequence represented by any of SEQ ID NO: 458, SEQ ID NO: 524, SEQ ID NO: 530, and SEQ ID NO: 536;
[0292] (ii) an amino acid sequence having, in increasing order of preference, at least 50%, 51%, 52%, 53%, 54%, 55%, 56%, 57%, 58%, 59%, 60%, 61%, 62%, 63%, 64%, 65%, 66%, 67%, 68%, 69%, 70%, 71%, 72%, 73%, 74%, 75%, 76%, 77%, 78%, 79%, 80%, 81%, 82%, 83%, 84%, 85%, 86%, 87%, 88%, 89%, 90%, 91%, 92%, 93%, 94%, 95%, 96%, 97%, 98%, or 99% sequence identity to any of the amino acid sequences represented by SEQ ID NO: 458, SEQ ID NO: 524, SEQ ID NO: 530, and SEQ ID NO: 536, and additionally or alternatively comprising one or more motifs having in increasing order of preference at least 50%, 55%, 60%, 65%, 70%, 75%, 80%, 85%, 90%, 95%, 96%, 97%, 98%, 99% or more sequence identity to any one or more of the motifs given in SEQ ID NO: 543 to SEQ ID NO: 551, and further preferably conferring enhanced yield-related traits relative to control plants;
[0293] (iii) derivatives of any of the amino acid sequences given in (i) or (ii) above.

[0294] Nucleic acid variants may also be useful in practising the methods of the invention. Examples of such variants include nucleic acids encoding homologues and derivatives of any one of the amino acid sequences given in Tables A of the Examples section, the terms “homologue” and “derivative” being as defined herein. Also useful in the methods of the invention are nucleic acids encoding homologues and derivatives of orthologues or paralogues of any one of the amino acid sequences given in Tables A of the Examples section. Homologues and derivatives useful in the methods of the present invention have substantially the same biological and functional activity as the unmodified protein from which they are derived. Further variants useful in practising the methods of the invention are variants in which codon usage is optimised or in which miRNA target sites are removed.

[0295] Further nucleic acid variants useful in practising the methods of the invention include portions of nucleic acids encoding WIL polypeptides or SAWADEE-like polypeptides or POZ-like polypeptides, nucleic acids hybridising to nucleic acids encoding WIL polypeptides or SAWADEE-like polypeptides or POZ-like polypeptides, splice variants of nucleic acids encoding WIL polypeptides or SAWADEE-like polypeptides or POZ-like polypeptides, allelic variants of nucleic acids encoding WIL polypeptides and variants of nucleic acids encoding WIL polypeptides or SAWADEE-like polypeptides or POZ-like polypeptides obtained by gene shuffling. The terms hybridising sequence, splice variant, allelic variant and gene shuffling are as described herein.

[0296] Nucleic acids encoding WIL polypeptides or SAWADEE-like polypeptides or POZ-like polypeptides need not be full-length nucleic acids, since performance of the methods of the invention does not rely on the use of full-length nucleic acid sequences. According to the present invention, there is provided a method for enhancing yield-related traits in plants, comprising introducing and expressing in a plant a portion of any one of the nucleic acid sequences given in Tables A of the Examples section, or a portion of a nucleic acid encoding an orthologue, paralogue or homologue of any of the amino acid sequences given in Tables A of the Examples section.

[0297] A portion of a nucleic acid may be prepared, for example, by making one or more deletions to the nucleic acid. The portions may be used in isolated form or they may be fused to other coding (or non-coding) sequences in order to, for example, produce a protein that combines several activities. When fused to other coding sequences, the resultant polypeptide produced upon translation may be bigger than that predicted for the protein portion.

[0298] Portions useful in the methods of the invention, encode a WIL polypeptide or a SAWADEE-like polypeptide or POZ-like polypeptides as defined herein, and have substantially the same biological activity as the amino acid sequences given in Tables A of the Examples section. Preferably, the portion is a portion of any one of the nucleic acids given in Tables A of the Examples section, or is a portion of a nucleic acid encoding an orthologue or paralogue of any one of the amino acid sequences given in Tables A of the Examples section. Preferably the portion is at least for a WIL polypeptide: 200, 250, 300, 350, 400, 450, 500, 550, 600, 650, 700, 750, 800, 850, 900, 950, 1000, 1050, 1100, 1150, 1200, 1250, 1300, 1350, 1400, 1450, 1500, 1550, 1600 or for a SAWADEE-like polypeptide: 500, 550, 600, 650, 700, 750, 800, 850, 900, 950, 1000, 1050, 1100, 1150, 1200 or for a POZ-like polypeptide: 500, 550, 600, 650, 700, 750, 800, 850, 900, 950, 1000 consecutive nucleotides in length, the consecutive nucleotides being of any one of the nucleic acid sequences given in Tables A of the Examples section, or of a nucleic acid encoding an orthologue or paralogue of any one of the amino acid sequences given in Tables A of the Examples section. Most preferably the portion is a portion of the nucleic acid of SEQ ID NO: 1 or SEQ ID NO: 324 or SEQ ID NO: 447.

[0299] Preferably, the portion encodes a fragment of an amino acid sequence which, when used in the construction of a phylogenetic tree, clusters with the group of WIL polypeptides comprising the amino acid sequence represented by SEQ ID NO: 2 rather than with any other group.

[0300] Preferably, the portion encodes a fragment of an amino acid sequence which, when used in the construction of a phylogenetic tree, such as the one depicted in FIG. 9, clusters within the group of POZ-like polypeptides preferably clusters within Class 2 or Class 3 as shown in FIG. 9, most preferably clusters within Class 3 of POZ-like polypeptides comprising the amino acid sequence represented by SEQ ID NO: 448, and/or comprises motifs one or more of motifs 7 to 15, and/or has at least 58%, preferably at least 63% sequence identity to SEQ ID NO: 448.

[0301] Another nucleic acid variant useful in the methods of the invention is a nucleic acid capable of hybridising, under reduced stringency conditions, preferably under stringent conditions, with a nucleic acid encoding a WIL polypeptide or a SAWADEE-like polypeptide or a POZ-like polypeptide as defined herein, or with a portion as defined herein.

[0302] According to the present invention, there is provided a method for enhancing yield-related traits in plants, comprising introducing and expressing in a plant a nucleic acid capable of hybridizing to any one of the nucleic acids given in Tables A of the Examples section, or comprising introducing and expressing in a plant a nucleic acid capable of hybridising to a nucleic acid encoding an orthologue, paralogue or homologue of any of the nucleic acid sequences given in Tables A of the Examples section.

[0303] Hybridising sequences useful in the methods of the invention encode a WIL polypeptide or a SAWADEE-like polypeptide or a POZ-like polypeptide as defined herein, having substantially the same biological activity as the amino acid sequences given in Tables A of the Examples section. Preferably, the hybridising sequence is capable of hybridising to the complement of any one of the nucleic acids given in Tables A of the Examples section, or to a portion of any of these sequences, a portion being as defined above, or the hybridising sequence is capable of hybridising to the complement of a nucleic acid encoding an orthologue or paralogue of any one of the amino acid sequences given in Tables A of the Examples section. Most preferably, the hybridising sequence is capable of hybridising to the complement of a nucleic acid as represented by SEQ ID NO: 1 or SEQ ID NO: 324 or SEQ ID NO: 447 or to a portion of any thereof.

[0304] Preferably, the hybridising sequence encodes a polypeptide with an amino acid sequence which, when full-length and used in the construction of a phylogenetic tree, clusters with the group of WIL polypeptides comprising the amino acid sequence represented by SEQ ID NO: 2 rather than with any other group.

[0305] Preferably, the hybridising sequence encodes a polypeptide having an amino acid sequence which, when full-length and used in the construction of a phylogenetic tree, such as the one depicted in FIG. 4, clusters with the group of SAWADEE-like polypeptides rather than with other homeobox proteins.

[0306] Preferably, the hybridising sequence encodes a polypeptide with an amino acid sequence which, when full-length and when used in the construction of a phylogenetic tree, such as the one depicted in FIG. 9, clusters within the group of POZ-like polypeptides preferably clusters within Class 2 or Class 3 as shown in FIG. 9, most preferably clusters within Class 3 of POZ-like polypeptides comprising the amino acid sequence represented by SEQ ID NO: 448, and/or comprises motifs one or more of motifs 7 to 15, and/or has at least 58%, preferably at least 63% sequence identity to SEQ ID NO: 448.

[0307] Another nucleic acid variant useful in the methods of the invention is a splice variant encoding a WIL polypeptide or a SAWADEE-like polypeptide or a POZ-like polypeptide as defined hereinabove, a splice variant being as defined herein.

[0308] According to the present invention, there is provided a method for enhancing yield-related traits in plants, comprising introducing and expressing in a plant a splice variant of any one of the nucleic acid sequences given in Table A of the Examples section, or a splice variant of a nucleic acid encoding an orthologue, paralogue or homologue of any of the amino acid sequences given in Table A of the Examples section.

[0309] Preferred splice variants are splice variants of a nucleic acid represented by SEQ ID NO: 1 or SEQ ID NO: 324 or SEQ ID NO: 447, or a splice variant of a nucleic acid encoding an orthologue or paralogue of SEQ ID NO: 2 or SEQ ID NO: 325 or SEQ ID NO: 448.

[0310] Preferably, the amino acid sequence encoded by the splice variant, when used in the construction of a phylogenetic tree, clusters with the group of WIL polypeptides comprising the amino acid sequence represented by SEQ ID NO: 2 rather than with any other.

[0311] Preferably, the amino acid sequence encoded by the splice variant, when used in the construction of a phylogenetic tree, such as the one depicted in FIG. 4, clusters with the group of SAWADEE-like polypeptides rather than with other homeobox protein.

[0312] Preferably, the amino acid sequence encoded by the splice variant, when used in the construction of a phylogenetic tree, such as the one depicted in FIG. 9, clusters within the group of POZ-like polypeptides preferably clusters within Class 2 or Class 3 as shown in FIG. 9, most preferably clusters within Class 3 of POZ-like polypeptides comprising the amino acid sequence represented by SEQ ID NO: 448, and/or comprises motifs one or more of motifs 7 to 15, and/or has at least 58%, preferably at least 63% sequence identity to SEQ ID NO: 448.

[0313] Another nucleic acid variant useful in performing the methods of the invention is an allelic variant of a nucleic acid encoding a WIL polypeptide or a SAWADEE-like polypeptide or a POZ-like polypeptide as defined hereinabove, an allelic variant being as defined herein.

[0314] According to the present invention, there is provided a method for enhancing yield-related traits in plants, comprising introducing and expressing in a plant an allelic variant of any one of the nucleic acids given in Table A of the Examples section, or comprising introducing and expressing in a plant an allelic variant of a nucleic acid encoding an orthologue, paralogue or homologue of any of the amino acid sequences given in Tables A of the Examples section.

[0315] The polypeptides encoded by allelic variants useful in the methods of the present invention have substantially the same biological activity as the WIL polypeptide of SEQ ID NO: 2 or or as the SAWADEE-like polypeptide of SEQ ID NO: 325 or as the POZ-like polypeptide of SEQ ID NO: 448 and any of the amino acids depicted in Tables A of the Examples section. Allelic variants exist in nature, and encompassed within the methods of the present invention is the use of these natural alleles. Preferably, the allelic variant is an allelic variant of SEQ ID NO: 1 or SEQ ID NO: 324 or SEQ ID NO: 447 or an allelic variant of a nucleic acid encoding an orthologue or paralogue of SEQ ID NO: 2 or SEQ ID NO: 325 or SEQ ID NO: 448.

[0316] Preferably, the amino acid sequence encoded by the allelic variant, when used in the construction of a phylogenetic tree, clusters with the WIL polypeptides comprising the amino acid sequence represented by SEQ ID NO: 2 rather than with any other group.

[0317] Preferably, the amino acid sequence encoded by the allelic variant, when used in the construction of a phylogenetic tree, such as the one depicted in FIG. 4, clusters with the SAWADEE-like polypeptides rather than with other homeobox proteins.

[0318] Preferably, the amino acid sequence encoded by the allelic variant, when used in the construction of a phylogenetic tree, such as the one depicted in FIG. 9, clusters within the group of POZ-like polypeptides preferably clusters within Class 2 or Class 3 as shown in FIG. 9, most preferably clusters within Class 3 of POZ-like polypeptides comprising the amino acid sequence represented by SEQ ID NO: 448, and/or comprises motifs one or more of motifs 7 to 15, and/or has at least 58%, preferably at least 63% sequence identity to SEQ ID NO: 448.

[0319] Gene shuffling or directed evolution may also be used to generate variants of nucleic acids encoding WIL polypeptides or SAWADEE-like polypeptides or POZ-like polypeptides as defined above; the term “gene shuffling” being as defined herein.

[0320] According to the present invention, there is provided a method for enhancing yield-related traits in plants, comprising introducing and expressing in a plant a variant of any one of the nucleic acid sequences given in Table A of the Examples section, or comprising introducing and expressing in a plant a variant of a nucleic acid encoding an orthologue, paralogue or homologue of any of the amino acid sequences given in Table A of the Examples section, which variant nucleic acid is obtained by gene shuffling.

[0321] Preferably, the amino acid sequence encoded by the variant nucleic acid obtained by gene shuffling, when used in the construction of a phylogenetic tree, clusters with the group of WIL polypeptides comprising the amino acid sequence represented by SEQ ID NO: 2 rather than with any other group.

[0322] Preferably, the amino acid sequence encoded by the variant nucleic acid obtained by gene shuffling, when used in the construction of a phylogenetic tree such as the one depicted in FIG. 4, clusters with the group of SAWADEE-like polypeptides rather than with other homeobox proteins.

[0323] Preferably, the amino acid sequence encoded by the variant nucleic acid obtained by gene shuffling, when used in the construction of a phylogenetic tree, such as the one depicted in FIG. 9, clusters within the group of POZ-like polypeptides preferably clusters within Class 2 or Class 3 as shown in FIG. 9, most preferably clusters within Class 3 of POZ-like polypeptides comprising the amino acid sequence represented by SEQ ID NO: 448, and/or comprises motifs one or more of motifs 7 to 15, and/or has at least 58%, preferably at least 63% sequence identity to SEQ ID NO: 448.

[0324] Furthermore, nucleic acid variants may also be obtained by site-directed mutagenesis. Several methods are available to achieve site-directed mutagenesis, the most common being PCR based methods (Current Protocols in Molecular Biology. Wiley Eds.).

[0325] Nucleic acids encoding WIL polypeptides or SAWADEE-like polypeptides or POZ-like polypeptides may be derived from any natural or artificial source. The nucleic acid may be modified from its native form in composition and/or genomic environment through deliberate human manipulation.

[0326] Preferably the WIL polypeptide-encoding nucleic acid is from a plant, further preferably from a monocotyledonous plant, more preferably from the family Poaceae, most preferably the nucleic acid is from Oryza sativa.

[0327] Preferably the SAWADEE-like polypeptide-encoding nucleic acid is from a plant, further preferably from a dicotyledonous plant, more preferably from the family brassicaceae or from the populus genus, most preferably the nucleic acid is from Populus trichocarpa.

[0328] Preferably the POZ-like polypeptide-encoding nucleic acid is from a plant, further preferably from a dicotyledonous plant, more preferably from the family Solanaceae, most preferably the nucleic acid is from Lycopersicon esculentum.

[0329] Performance of the methods of the invention gives plants having enhanced yield-related traits. In particular performance of the methods of the invention gives plants having increased yield, especially increased seed yield or increased biomass relative to control plants. The terms “yield” and “seed yield” are described in more detail in the “definitions” section herein.

[0330] Reference herein to enhanced yield-related traits is taken to mean an increase early vigour and/or in biomass (weight) of one or more parts of a plant, which may include aboveground (harvestable) parts and/or (harvestable) parts below ground. In particular, such harvestable parts are seeds and/or biomass, and performance of the methods of the invention results in plants having increased seed yield relative to the seed yield of control plants.

[0331] The present invention provides a method for increasing yield, especially seed yield of plants or biomass, relative to control plants, which method comprises modulating expression in a plant of a nucleic acid encoding a WIL polypeptide or a SAWADEE-like polypeptide or a POZ-like polypeptide as defined herein.

[0332] According to a preferred feature of the present invention, performance of the methods of the invention gives plants having an increased growth rate relative to control plants. Therefore, according to the present invention, there is provided a method for increasing the growth rate of plants, which method comprises modulating expression in a plant of a nucleic acid encoding a WIL polypeptide or a SAWADEE-like polypeptide or a POZ-like polypeptide as defined herein.

[0333] Performance of the methods of the invention gives plants grown under non-stress conditions or under mild drought conditions increased yield relative to control plants grown under comparable conditions. Therefore, according to the present invention, there is provided a method for increasing yield in plants grown under non-stress conditions or under mild drought conditions, which method comprises modulating expression in a plant of a nucleic acid encoding a WIL polypeptide or a SAWADEE-like polypeptide or a POZ-like polypeptide.

[0334] Performance of the methods of the invention gives plants grown under conditions of nutrient deficiency, particularly under conditions of nitrogen deficiency, increased yield relative to control plants grown under comparable conditions. Therefore, according to the present invention, there is provided a method for increasing yield in plants grown under conditions of nutrient deficiency, which method comprises modulating expression in a plant of a nucleic acid encoding a WIL polypeptide or a SAWADEE-like polypeptide or a POZ-like polypeptide.

[0335] Performance of the methods of the invention gives plants grown under conditions of salt stress, increased yield relative to control plants grown under comparable conditions. Therefore, according to the present invention, there is provided a method for increasing yield in plants grown under conditions of salt stress, which method comprises modulating expression in a plant of a nucleic acid encoding a WIL polypeptide or a SAWADEE-like polypeptide or a POZ-like polypeptide.

[0336] The invention also provides genetic constructs and vectors to facilitate introduction and/or expression in plants of nucleic acids encoding WIL polypeptides or SAWADEE-like polypeptides or a POZ-like polypeptide. The gene constructs may be inserted into vectors, which may be commercially available, suitable for transforming into plants and suitable for expression of the gene of interest in the transformed cells. The invention also provides use of a gene construct as defined herein in the methods of the invention.

[0337] More specifically, the present invention provides a construct comprising:
[0338] (a) a nucleic acid encoding a WIL polypeptide or a SAWADEE-like polypeptide or a POZ-like polypeptide as defined above;
[0339] (b) one or more control sequences capable of driving expression of the nucleic acid sequence of (a); and optionally
[0340] (c) a transcription termination sequence.

[0341] Preferably, the nucleic acid encoding a WIL polypeptide or a SAWADEE-like polypeptide or a POZ-like polypeptide is as defined above. The term “control sequence” and “termination sequence” are as defined herein.

[0342] The invention furthermore provides plants transformed with a construct as described above.

[0343] In particular, the invention provides plants transformed with a construct as described above, which plants have increased yield-related traits as described herein.

[0344] Plants are transformed with a vector comprising any of the nucleic acids described above. The skilled artisan is well aware of the genetic elements that must be present on the vector in order to successfully transform, select and propagate host cells containing the sequence of interest. The sequence of interest is operably linked to one or more control sequences, at least to a promoter.

[0345] Advantageously, any type of promoter, whether natural or synthetic, may be used to drive expression of the nucleic acid sequence, but preferably the promoter is of plant origin. A constitutive promoter is particularly useful in the methods. Preferably the constitutive promoter is a ubiquitous constitutive promoter of medium strength. See the “Definitions” section herein for definitions of the various promoter types.

[0346] It should be clear that the applicability of the present invention is not restricted to the WIL polypeptide or SAWADEE-like polypeptide or a POZ-like polypeptide-encoding nucleic acid represented by SEQ ID NO: 1 or SEQ ID NO: 324 or SEQ ID NO: 447, nor is the applicability of the invention restricted to expression of a WIL polypeptide or SAWADEE-like polypeptide or a POZ-like polypeptide-encoding nucleic acid when driven by a constitutive promoter.

[0347] The constitutive promoter is preferably a medium strength promoter. More preferably it is a plant derived promoter, such as a GOS2 promoter or a promoter of substantially the same strength and having substantially the same expression pattern (a functionally equivalent promoter), more preferably the promoter is the promoter GOS2 promoter from rice. Further preferably the constitutive promoter is represented by a nucleic acid sequence substantially similar to SEQ ID NO: 321 or SEQ ID NO: 443 or SEQ ID NO: 552, most preferably the constitutive promoter is as represented by SEQ ID NO: 321 or SEQ ID NO: 443 or SEQ ID NO: 552. See the “Definitions” section herein for further examples of constitutive promoters.

[0348] Optionally, one or more terminator sequences may be used in the construct introduced into a plant. Preferably, the construct comprises an expression cassette comprising a GOS2 promoter, substantially similar to SEQ ID NO: 320 or SEQ ID NO: 443 or SEQ ID NO: 553, and the nucleic acid encoding the WIL polypeptide or SAWADEE-like polypeptide or POZ-like polypeptide. More preferably, the expression cassette comprises the sequence represented by SEQ ID NO: 320 (pGOS2::WIL::t-zein sequence) or SEQ ID NO: 444 (pPRO::GOI::t-zein sequence) or SEQ ID NO: 553 (pPRO::GOI::t-zein sequence). Furthermore, one or more sequences encoding selectable markers may be present on the construct introduced into a plant.

[0349] According to a preferred feature of the invention, the modulated expression is increased expression. Methods for increasing expression of nucleic acids or genes, or gene products, are well documented in the art and examples are provided in the definitions section.

[0350] As mentioned above, a preferred method for modulating expression of a nucleic acid encoding a WIL polypeptide or a SAWADEE-like polypeptide or a POZ-like polypeptide is by introducing and expressing in a plant a nucleic acid encoding a WIL polypeptide or a SAWADEE-like polypeptide or a POZ-like polypeptide; however the effects of performing the method, i.e. enhancing yield-related traits may also be achieved using other well known techniques, including but not limited to T-DNA activation tagging, TILLING, homologous recombination. A description of these techniques is provided in the definitions section.

[0351] The invention also provides a method for the production of transgenic plants having enhanced yield-related traits relative to control plants, comprising introduction and expression in a plant of any nucleic acid encoding a WIL polypeptide or a SAWADEE-like polypeptide or a POZ-like polypeptide as defined hereinabove.

[0352] More specifically, the present invention provides a method for the production of transgenic plants having enhanced yield-related traits, particularly increased seed yield, which method comprises:
[0353] (i) introducing and expressing in a plant or plant cell a WIL polypeptide or a SAWADEE-like polypeptide or a POZ-like polypeptide-encoding nucleic acid or a genetic construct comprising a WIL polypeptide or a SAWADEE-like polypeptide or a POZ-like polypeptide-encoding nucleic acid; and
[0354] (ii) cultivating the plant cell under conditions promoting plant growth and development.

[0355] Cultivating the plant cell under conditions promoting plant growth and development, may or may not include regeneration and or growth to maturity.

[0356] The nucleic acid of (i) may be any of the nucleic acids capable of encoding a WIL polypeptide or a SAWADEE-like polypeptide or a POZ-like polypeptide as defined herein.

[0357] The nucleic acid may be introduced directly into a plant cell or into the plant itself (including introduction into a tissue, organ or any other part of a plant). According to a preferred feature of the present invention, the nucleic acid is preferably introduced into a plant by transformation. The term “transformation” is described in more detail in the “definitions” section herein.

[0358] The present invention clearly extends to any plant cell or plant produced by any of the methods described herein, and to all plant parts and propagules thereof. The present invention encompasses plants or parts thereof (including seeds) obtainable by the methods according to the present invention. The plants or parts thereof comprise a nucleic acid transgene encoding a WIL polypeptide or a SAWADEE-like polypeptide or a POZ-like polypeptide as defined above. The present invention extends further to encompass the progeny of a primary transformed or transfected cell, tissue, organ or whole plant that has been produced by any of the aforementioned methods, the only requirement being that progeny exhibit the same genotypic and/or phenotypic characteristic(s) as those produced by the parent in the methods according to the invention.

[0359] The invention also includes host cells containing an isolated nucleic acid encoding a WIL polypeptide or a SAWADEE-like polypeptide or a POZ-like polypeptide as defined hereinabove. Preferred host cells according to the invention are plant cells. Host plants for the nucleic acids or the vector used in the method according to the invention, the expression cassette or construct or vector are, in principle, advantageously all plants, which are capable of synthesizing the polypeptides used in the inventive method.

[0360] The methods of the invention are advantageously applicable to any plant, in particular to any plant as defined herein. Plants that are particularly useful in the methods of the invention include all plants which belong to the superfamily Viridiplantae, in particular monocotyledonous and dicotyledonous plants including fodder or forage legumes, ornamental plants, food crops, trees or shrubs.

[0361] According to an embodiment of the present invention, the plant is a crop plant. Examples of crop plants include but are not limited to chicory, carrot, cassava, trefoil, soybean, beet, sugar beet, sunflower, canola, alfalfa, rapeseed, linseed, cotton, tomato, potato and tobacco.

[0362] According to another embodiment of the present invention, the plant is a monocotyledonous plant. Examples of monocotyledonous plants include sugarcane.

[0363] According to another embodiment of the present invention, the plant is a cereal. Examples of cereals include rice, maize, wheat, barley, millet, rye, triticale, sorghum, emmer, spelt, secale, einkorn, teff, milo and oats.

[0364] The invention also extends to harvestable parts of a plant such as, but not limited to seeds, leaves, fruits, flowers, stems, roots, rhizomes, tubers and bulbs, which harvestable parts comprise a recombinant nucleic acid encoding a WIL polypeptide or a SAWADEE-like polypeptide or a POZ-like polypeptide. The invention furthermore relates to products derived, preferably directly derived, from a harvestable part of such a plant, such as dry pellets or powders, oil, fat and fatty acids, starch or proteins.

[0365] The present invention also encompasses use of nucleic acids encoding WIL polypeptides or SAWADEE-like polypeptides or a POZ-like polypeptide as described herein and use of these WIL polypeptides or SAWADEE-like polypeptides or a POZ-like polypeptide in enhancing any of the aforementioned yield-related traits in plants. For example, nucleic acids encoding WIL polypeptide or SAWADEE-like polypeptide or a POZ-like polypeptide described herein, or the WIL polypeptides or SAWADEE-like polypeptides or a POZ-like polypeptide themselves, may find use in breeding programmes in which a DNA marker is identified which may be genetically linked to a WIL polypeptide or a SAWADEE-like polypeptide or a POZ-like polypeptide-encoding gene. The nucleic acids/genes, or the WIL polypeptides or SAWADEE-like polypeptides or a POZ-like polypeptide themselves may be used to define a molecular marker. This DNA or protein marker may then be used in breeding programmes to select plants having enhanced yield-related traits as defined hereinabove in the methods of the invention. Furthermore, allelic variants of a WIL polypeptide or a SAWADEE-like polypeptide or a POZ-like polypeptide-encoding nucleic acid/gene may find use in marker-assisted breeding programmes. Nucleic acids encoding WIL polypeptides or SAWADEE-like polypeptides or a POZ-like polypeptide may also be used as probes for genetically and physically mapping the genes that they are a part of, and as markers for traits linked to those genes. Such information may be useful in plant breeding in order to develop lines with desired phenotypes.

### EMBODIMENTS

[0366] 1. A method for enhancing yield-related traits in plants relative to control plants, comprising modulating expression in a plant of a nucleic acid encoding a WI12-like (WIL) polypeptide, wherein said WIL polypeptide comprises one or more of the following motifs:

(i) Motif 1:
(SEQ ID NO: 317)
IT[RQ][VL]REYFNTS[VL]TV[RT][DR][VLF],
(ii) Motif 2:
(SEQ ID NO: 318)
[PR][RS][AIV][YS]W[VI]H[AV]W[AT]V[ET][GD]G[RGI],
(iii) Motif 3:
(SEQ ID NO: 319)
[DS][DN][DR][DVA][DG][RK]S[VL]PGLVLA[IL]

[0367] 2. Method according to embodiment 1, wherein said nucleic acid encoding a WIL polypeptide comprises an Interpro accession IPR009798 WI12 domain, corresponding to PFAM accession number PF07107 WI12 domain.
[0368] 3. Method according to embodiment 1 or 2, wherein said modulated expression is effected by introducing and expressing in a plant said nucleic acid encoding said WIL polypeptide.
[0369] 4. Method according to any of the embodiments 1 to 3, wherein said enhanced yield-related traits comprise increased yield relative to control plants, and preferably comprise increased biomass and/or increased seed yield relative to control plants.
[0370] 5. Method according to any one of embodiments 1 to 4, wherein said enhanced yield-related traits are obtained under non-stress conditions.
[0371] 6. Method according to any one of embodiments 1 to 4, wherein said enhanced yield-related traits are obtained under conditions of drought stress, salt stress or nitrogen deficiency.
[0372] 7. Method according to any one of embodiments 1 to 6, wherein said nucleic acid encoding a WIL is of plant origin, preferably from a monocotyledonous plant, further preferably from the family Poaceae, more preferably from the genus Oryza, most preferably from Oryza sativa.
[0373] 8. Method according to any one of embodiments 1 to 7, wherein said nucleic acid encoding a WIL encodes any one of the polypeptides listed in Table A1 or is a portion of such a nucleic acid, or a nucleic acid capable of hybridising with such a nucleic acid.
[0374] 9. Method according to any one of embodiments 1 to 8, wherein said nucleic acid sequence encodes an orthologue or paralogue of any of the polypeptides given in Table A1.
[0375] 10. Method according to any one of embodiments 1 to 9, wherein said nucleic acid encodes the WIL polypeptide represented by SEQ ID NO: 2.
[0376] 11. Method according to any one of embodiments 1 to 10, wherein said nucleic acid is operably linked to a constitutive promoter, preferably to a medium strength constitutive promoter, preferably to a plant promoter, more preferably to a GOS2 promoter, most preferably to a GOS2 promoter from rice.
[0377] 12. Plant, plant part thereof, including seeds, or plant cell, obtainable by a method according to any one of embodiments 1 to 11, wherein said plant, plant part or plant cell comprises a recombinant nucleic acid encoding a WIL polypeptide as defined in any of embodiments 1, 2 and 7 to 10.
[0378] 13. Construct comprising:

[0379] (i) nucleic acid encoding a WIL as defined in any of embodiments 1, 2 and 7 to 10;
[0380] (ii) one or more control sequences capable of driving expression of the nucleic acid sequence of (i); and optionally
[0381] (iii) a transcription termination sequence.
[0382] 14. Construct according to embodiment 13, wherein one of said control sequences is a constitutive promoter, preferably a medium strength constitutive promoter, preferably to a plant promoter, more preferably a GOS2 promoter, most preferably a GOS2 promoter from rice.
[0383] 15. Use of a construct according to embodiment 13 or 14 in a method for making plants having enhanced yield-related traits, preferably increased yield relative to control plants, and more preferably increased seed yield and/or increased biomass relative to control plants.
[0384] 16. Plant, plant part or plant cell transformed with a construct according to embodiment 13 or 14.
[0385] 17. Method for the production of a transgenic plant having enhanced yield-related traits relative to control plants, preferably increased yield relative to control plants, and more preferably increased seed yield and/or increased biomass relative to control plants, comprising:
   [0386] (i) introducing and expressing in a plant cell or plant a nucleic acid encoding a WIL polypeptide as defined in any of embodiments 1, 2 and 7 to 10; and
   [0387] (ii) cultivating said plant cell or plant under conditions promoting plant growth and development.
[0388] 18. Transgenic plant having enhanced yield-related traits relative to control plants, preferably increased yield relative to control plants, and more preferably increased seed yield and/or increased biomass, resulting from modulated expression of a nucleic acid encoding a WIL polypeptide as defined in any of embodiments 1, 2 and 7 to 10 or a transgenic plant cell derived from said transgenic plant.
[0389] 19. Transgenic plant according to embodiment 12, 16 or 18, or a transgenic plant cell derived therefrom, wherein said plant is a crop plant, such as beet, sugarbeet or alfalfa; or a monocotyledonous plant such as sugarcane; or a cereal, such as rice, maize, wheat, barley, millet, rye, triticale, sorghum, emmer, spelt, secale, einkorn, teff, milo or oats.
[0390] 20. Harvestable parts of a plant according to embodiment 19, wherein said harvestable parts are preferably shoot biomass and/or seeds.
[0391] 21. Products derived from a plant according to embodiment 19 and/or from harvestable parts of a plant according to embodiment 20.
[0392] 22. Use of a nucleic acid encoding a WIL polypeptide as defined in any of embodiments 1, 2 and 7 to 10 for enhancing yield-related traits in plants relative to control plants, preferably for increasing yield, and more preferably for increasing seed yield and/or for increasing biomass in plants relative to control plants.
[0393] 23. A method for enhancing yield-related traits in plants relative to control plants, comprising modulating expression in a plant of a nucleic acid encoding a SAWADEE-like polypeptide, wherein said SAWADEE-like polypeptide comprises (i) a homeodomain, (ii) a SAWADEE domain and (iii) a nuclear localisation signal (NLS).
[0394] 24. Method according to embodiment 23, wherein said homeodomain is represented by the following sequence NGGPSFRFMQYEVTEMDAI LQEHHNMMPAREVLVSLAEKFS ESSERKGKIQVQMKQVWNWFQNRRYAIRAKS (SEQ ID NO: 438) or by a sequence having in increasing order of preference at least 60%, 61%, 62%, 63%, 64%, 65%, 66%, 67%, 68%, 69%, 70%, 71%, 72%, 73%, 74%, 75%, 76%, 77%, 78%, 79%, 80%, 81%, 82%, 83%, 84%, 85%, 86%, 87%, 88%, 89%, 90%, 91%, 92%, 93%, 94%, 95%, 96%, 97%, 98%, or 99% sequence identity to Domain I or by a sequence falling under Inter Pro accession number IPRO01356.
[0395] 25. Method according to embodiment 23 or 24, wherein said SAWADEE domain comprises each of Motifs 4, 5 and 6 as follows and comprises the conserved cysteine and histidine residues indicated in bold and underlined or as indicated in the alignment of FIG. 3
   [0396] Motif 4
   [0397] [PV]GDL[IV]LCFQEGK[ED]QALY[FY]DAHVL[DE][IA]QR[RK][RL]HD[VI]RGCRC[RI]F [LV]VRYDHDQSEE (SEQ ID NO: 439), or a motif having in increasing order of preference at least 60%, 61%, 62%, 63%, 64%, 65%, 66%, 67%, 68%, 69%, 70%, 71%, 72%, 73%, 74%, 75%, 76%, 77%, 78%, 79%, 80%, 81%, 82%, 83%, 84%, 85%, 86%, 87%, 88%, 89%, 90%, 91%, 92%, 93%, 94%, 95%, 96%, 97%, 98%, or 99% sequence identity to the Motif 4; and
   [0398] Motif 5
   [0399] EV[RL]VRF[AS]GFG[AP]EEDEW[VI]NV[RK][KR] (SEQ ID NO: 440), or a motif having in increasing order of preference at least 60%, 61%, 62%, 63%, 64%, 65%, 66%, 67%, 68%, 69%, 70%, 71%, 72%, 73%, 74%, 75%, 76%, 77%, 78%, 79%, 80%, 81%, 82%, 83%, 84%, 85%, 86%, 87%, 88%, 89%, 90%, 91%, 92%, 93%, 94%, 95%, 96%, 97%, 98%, or 99% sequence identity to the Motif 5; and
   [0400] Motif 6
   [0401] [RK]DGAWYDVA[AST]FL[ST][HY]R (SEQ ID NO: 441), or a motif having in increasing order of preference at least 60%, 61%, 62%, 63%, 64%, 65%, 66%, 67%, 68%, 69%, 70%, 71%, 72%, 73%, 74%, 75%, 76%, 77%, 78%, 79%, 80%, 81%, 82%, 83%, 84%, 85%, 86%, 87%, 88%, 89%, 90%, 91%, 92%, 93%, 94%, 95%, 96%, 97%, 98%, or 99% sequence identity to the Motif 6.
[0402] 26. Method according to any one of embodiments 23 to 25, wherein said modulated expression is effected by introducing and expressing in a plant said nucleic acid encoding said SAWADEE-like polypeptide.
[0403] 27. Method according to any one of embodiments 23 to 26, wherein said enhanced yield-related traits comprise increased biomass and/or increased seed yield relative to control plants.
[0404] 28. Method according to any one of embodiments 23 to 27, wherein said enhanced yield-related traits are obtained under non-stress conditions.
[0405] 29. Method according to any one of embodiments 23 to 27, wherein said enhanced yield-related traits are obtained under conditions of nitrogen deficiency.
[0406] 30. Method according to any one of embodiments 23 to 29, wherein said nucleic acid encoding a SAWADEE-like polypeptide is of plant origin, further preferably from a dicotyledonous plant, more preferably from the family brassicaceae or from the populus genus, most preferably the nucleic acid is from Populus trichocarpa.
[0407] 31. Method according to any one of embodiments 23 to 30, wherein said nucleic acid encoding a SAWADEE-like polypeptide encodes any one of the polypeptides listed in Table A2 or is a portion of such a nucleic acid, or a nucleic acid capable of hybridising with such a nucleic acid and/or wherein said nucleic acid sequence encodes an orthologue or paralogue of any of the polypeptides given in Table A2.
[0408] 32. Method according to any one of embodiments 23 to 31, wherein said nucleic acid is operably linked to a constitutive promoter, preferably to a medium strength constitutive promoter, preferably to a plant promoter, more preferably to a GOS2 promoter, most preferably to a GOS2 promoter from rice.
[0409] 33. Plant, plant part thereof, including seeds, or plant cell, obtainable by a method according to any one of embodiments 23 to 32, wherein said plant, plant part or plant cell comprises a recombinant nucleic acid encoding a SAWADEE-like polypeptide as defined in any of embodiments 23 to 25.
[0410] 34. Construct comprising:
   [0411] (i) nucleic acid encoding a SAWADEE-like polypeptide as defined in any of embodiments 23 to 25;
   [0412] (ii) one or more control sequences capable of driving expression of the nucleic acid sequence of (i); and optionally
   [0413] (iii) a transcription termination sequence.
[0414] 35. Construct according to embodiment 34, wherein one of said control sequences is a constitutive promoter, preferably a medium strength constitutive promoter, preferably to a plant promoter, more preferably a GOS2 promoter, most preferably a GOS2 promoter from rice.
[0415] 36. Use of a construct according to embodiment 34 or 35 in a method for making plants having enhanced yield-related traits relative to control plants.
[0416] 37. Plant, plant part or plant cell transformed with a construct according to embodiment 34 or 35.
[0417] 38. Method for the production of a transgenic plant having enhanced yield-related traits relative to control plants, comprising:
   [0418] (i) introducing and expressing in a plant cell or plant a nucleic acid encoding a SAWADEE-like polypeptide as defined in any of embodiments 23 to 25; and
   [0419] (ii) cultivating said plant cell or plant under conditions promoting plant growth and development.
[0420] 39. Transgenic plant having enhanced yield-related traits relative to control plants, preferably increased yield relative to control plants, and more preferably increased seed yield and/or increased biomass, resulting from modulated expression of a nucleic acid encoding a SAWADEE-like polypeptide as defined in any of embodiments 23 to 25 or a transgenic plant cell derived from said transgenic plant.
[0421] 40. Transgenic plant according to any of embodiments 33, 37 or 39, or a transgenic plant cell derived therefrom, wherein said plant is a crop plant, such as beet, sugarbeet or alfalfa; or a monocotyledonous plant such as sugarcane; or a cereal, such as rice, maize, wheat, barley, millet, rye, triticale, sorghum, emmer, spelt, secale, einkorn, teff, milo or oats.
[0422] 41. Harvestable parts of a plant according to embodiment 40, wherein said harvestable parts are preferably shoot biomass and/or seeds.
[0423] 42. Products derived from a plant according to embodiment 40 and/or from harvestable parts of a plant according to embodiment 41.
[0424] 43. Use of a nucleic acid encoding a SAWADEE-like polypeptide as defined in any of embodiments 23 to 25 for enhancing yield-related traits in plants relative to control plants, preferably for increasing yield, and more preferably for increasing seed yield and/or for increasing biomass in plants relative to control plants.
[0425] 44. A method for enhancing yield-related traits in plants relative to control plants, comprising modulating expression in a plant of a nucleic acid encoding a POZ-like polypeptide, wherein said POZ-like polypeptide comprises a PFam PF00651 domain.
[0426] 45. Method according to embodiment 44, wherein said POZ-like polypeptide comprises one or more of the following motifs:

(i) Motif 7:
(SEQ ID NO: 543)
AH[RK]A[VI]L[AS]A[RTS]SPVF[REH]SMF[SL]H[DN]L[KR]
EKE[SL]S[IT][IV][NDH]I[SE]DMS[TL]E[SA]C[QTM]A
[LF]L[SN]Y[LI]YG[NT]I,
(ii) Motif 8:
(SEQ ID NO: 544)
[DE][LF][WL]KHRLALL[GR]AA[DN]KYDI[VG]DLK[END]AC
[EH]ESLLEDI[DN][ST][KG]NVLERLQEAWLYQL,
(iii) Motif 9:
(SEQ ID NO: 545)
[KR]VET[ILT]SRLAQWRI[DE]N[LF][GT][PAS][SC][TS]Y
[RK][KR]SDPFK[IV]G[IL]WNW[HY]LS[VI]E[KR]N.

[0427] 46. Method according to embodiment 44 or 45, wherein said nucleic acid encoding a POZ-like encodes any one of the polypeptides listed in Table A3 or is a portion of such a nucleic acid, or a nucleic acid capable of hybridising with such a nucleic acid.
[0428] 47. Method according to embodiment 44 or 45, wherein said nucleic acid sequence encodes an orthologue or paralogue of any of the polypeptides given in Table A3.
[0429] 48. Method according to embodiment 44 or 45, wherein said nucleic acid encoding a POZ-like is of plant origin, preferably from a dicotyledonous plant, further preferably from the family Solanaceae, more preferably from the genus Lycopersicon, most preferably from Lycopersicon exculentum.
[0430] 49. Method according to embodiment 48, wherein said nucleic acid encodes the polypeptide represented by SEQ ID NO: 448.
[0431] 50. Method according to any one of embodiments 44 to 49, wherein said modulated expression is effected by introducing and expressing in a plant said nucleic acid encoding said POZ-like polypeptide.
[0432] 51. Method according to any one of embodiments 44 to 50, wherein said enhanced yield-related traits comprise increased yield relative to control plants, and preferably comprise increased biomass and/or increased seed yield relative to control plants.
[0433] 52. Method according to any one of embodiments 44 to 51, wherein said enhanced yield-related traits are obtained under conditions of nitrogen deficiency.
[0434] 53. Method according to any one of embodiments 50 to 52, wherein said nucleic acid is operably linked to a constitutive promoter, preferably to a medium strength constitutive promoter, preferably to a plant promoter, more preferably to a GOS2 promoter, most preferably to a GOS2 promoter from rice.
[0435] 54. Plant, plant part thereof, including seeds, or plant cell, obtainable by a method according to any one of embodiments 44 to 53, wherein said plant, plant part or plant cell comprises a recombinant nucleic acid encoding a POZ-like polypeptide as defined in any of embodiments 44 to 49.
[0436] 55. Construct comprising:
   [0437] (i) nucleic acid encoding a POZ-like as defined in any of embodiments 44 to 49;
   [0438] (ii) one or more control sequences capable of driving expression of the nucleic acid sequence of (i); and optionally
   [0439] (iii) a transcription termination sequence.
[0440] 56. Construct according to embodiment 55, wherein one of said control sequences is a constitutive promoter, preferably a medium strength constitutive promoter, preferably to a plant promoter, more preferably a GOS2 promoter, most preferably a GOS2 promoter from rice.
[0441] 57. Use of a construct according to embodiment 55 or 56 in a method for making plants having enhanced yield-related traits, preferably increased yield relative to control plants, and more preferably increased seed yield and/or increased biomass relative to control plants.
[0442] 58. Plant, plant part or plant cell transformed with a construct according to embodiment 55 or 56.
[0443] 59. Method for the production of a transgenic plant having enhanced yield-related traits relative to control plants, preferably increased yield relative to control plants, and more preferably increased seed yield and/or increased biomass relative to control plants, comprising:
   [0444] (i) introducing and expressing in a plant cell or plant a nucleic acid encoding a POZ-like polypeptide as defined in any of embodiments 44 to 49; and
   [0445] (ii) cultivating said plant cell or plant under conditions promoting plant growth and development.
[0446] 60. Transgenic plant having enhanced yield-related traits relative to control plants, preferably increased yield relative to control plants, and more preferably increased seed yield and/or increased biomass, resulting from modulated expression of a nucleic acid encoding a POZ-like polypeptide as defined in any of embodiments 44 to 49 or a transgenic plant cell derived from said transgenic plant.
[0447] 61. Transgenic plant according to embodiment 54, 58 or 60, or a transgenic plant cell derived therefrom, wherein said plant is a crop plant, such as beet, sugarbeet or alfalfa; or a monocotyledonous plant such as sugarcane; or a cereal, such as rice, maize, wheat, barley, millet, rye, triticale, sorghum, emmer, spelt, secale, einkorn, teff, milo or oats.
[0448] 62. Harvestable parts of a plant according to embodiment 61, wherein said harvestable parts are preferably shoot biomass and/or seeds.
[0449] 63. Products derived from a plant according to embodiment 61 and/or from harvestable parts of a plant according to embodiment 62.
[0450] 64. Use of a nucleic acid encoding a POZ-like polypeptide as defined in any of embodiments 44 to 49 for enhancing yield-related traits in plants relative to control plants, preferably for increasing yield, and more preferably for increasing seed yield and/or for increasing biomass in plants relative to control plants.
[0451] 65. An isolated nucleic acid molecule selected from:
   [0452] (i) a nucleic acid represented by any of SEQ ID NO: 457, SEQ ID NO: 523, SEQ ID NO: 529, and SEQ ID NO: 535;
   [0453] (ii) the complement of a nucleic acid represented by SEQ ID NO: 457, SEQ ID NO: 523, SEQ ID NO: 529, and SEQ ID NO: 535;
   [0454] (iii) a nucleic acid encoding a POZ-like polypeptide having in increasing order of preference at least 50%, 51%, 52%, 53%, 54%, 55%, 56%, 57%, 58%, 59%, 60%, 61%, 62%, 63%, 64%, 65%, 66%, 67%, 68%, 69%, 70%, 71%, 72%, 73%, 74%, 75%, 76%, 77%, 78%, 79%, 80%, 81%, 82%, 83%, 84%, 85%, 86%, 87%, 88%, 89%, 90%, 91%, 92%, 93%, 94%, 95%, 96%, 97%, 98%, or 99% sequence identity to any of the amino acid sequences represented by SEQ ID NO: 458, SEQ ID NO: 524, SEQ ID NO: 530, and SEQ ID NO: 536, and additionally or alternatively comprising one or more motifs having in increasing order of preference at least 50%, 55%, 60%, 65%, 70%, 75%, 80%, 85%, 90%, 95%, 96%, 97%, 98%, 99% or more sequence identity to any one or more of the motifs given in SEQ ID NO: 543 to SEQ ID NO: 551, and further preferably conferring enhanced yield-related traits relative to control plants.
   [0455] (iv) a nucleic acid molecule which hybridizes with a nucleic acid molecule of (i) to (iii) under high stringency hybridization conditions and preferably confers enhanced yield-related traits relative to control plants.
[0456] 66. An isolated polypeptide selected from:
   [0457] (i) an amino acid sequence represented by any of SEQ ID NO: 458, SEQ ID NO: 524, SEQ ID NO: 530, and SEQ ID NO: 536;
   [0458] (ii) an amino acid sequence having, in increasing order of preference, at least 50%, 51%, 52%, 53%, 54%, 55%, 56%, 57%, 58%, 59%, 60%, 61%, 62%, 63%, 64%, 65%, 66%, 67%, 68%, 69%, 70%, 71%, 72%, 73%, 74%, 75%, 76%, 77%, 78%, 79%, 80%, 81%, 82%, 83%, 84%, 85%, 86%, 87%, 88%, 89%, 90%, 91%, 92%, 93%, 94%, 95%, 96%, 97%, 98%, or 99% sequence identity to any of the amino acid sequences represented SEQ ID NO: 458, SEQ ID NO: 524, SEQ ID NO: 530, and SEQ ID NO: 536, and additionally or alternatively comprising one or more motifs having in increasing order of preference at least 50%, 55%, 60%, 65%, 70%, 75%, 80%, 85%, 90%, 95%, 96%, 97%, 98%, 99% or more sequence identity to any one or more of the motifs given in SEQ ID NO: 543 to SEQ ID NO: 551, and further preferably conferring enhanced yield-related traits relative to control plants;
   [0459] (iii) derivatives of any of the amino acid sequences given in (i) or (ii) above.

### DESCRIPTION OF FIGURES

[0460] The present invention will now be described with reference to the following figures in which:

[0461] FIG. 1 represents the domain structure of SEQ ID NO: 2 with conserved motifs.

[0462] FIG. 2 represents the binary vector used for increased expression in Oryza sativa of a WIL-encoding nucleic acid under the control of a rice GOS2 promoter (pGOS2).

[0463] FIG. 3 represents a multiple alignment of various SAWADEE-like polypeptides. The alignment was done using AlignX from VNTI as described further in Example 2 herein. The alignment may be used for defining further motifs using conserved amino acids. A.thaliana_AT3G18380.2: SEQ ID NO: 333; B.napus_TC87129: SEQ ID NO: 337; G.max_Glyma06g35560.1: SEQ ID NO: 351; G.max_Glyma12g18490.1: SEQ ID NO: 353; F.vesca_TA9550_{—}57918: SEQ ID NO: 349; Triphysaria_sp_TC5080: SEQ ID NO: 413; Triphysaria_sp_TC5234: SEQ ID NO: 415; Aquilegia_sp_TC20929: SEQ ID NO: 327; B.napus_BN06MCO5266: SEQ ID NO: 339; C.annuum_TC19347: SEQ ID NO: 343; S.lycopersicum_TC192705: SEQ ID NO: 403; S.tuberosum_TC191509: SEQ ID NO: 405; N.tabacum_TC63901: SEQ ID NO: 379; O.basilicum_TA1574_{—}39350: SEQ ID NO: 381; P.trichocarpa_{—}829564: SEQ ID NO: 393; V.vinifera_GSVIVT00034323001: SEQ ID NO: 423; G.max_Glyma07g01880.1: SEQ ID NO: 359; G.max_Glyma08g21560.1: SEQ ID NO: 361; C.maculosa_TA3277_{—}215693: SEQ ID NO: 345; C.solstitialis_TA4707_{—}347529: SEQ ID NO: 347; L.perennis_TA4007_{—}43195: SEQ ID NO: 371; G.hirsutum_TC160629: SEQ ID NO: 363; V.vinifera_GSVIVT00032090001: SEQ ID NO: 425; I.nil_TC11734: SEQ ID NO: 369; N.tabacum_TC73014: SEQ ID NO: 377; S.lycopersicum_TC216862: SEQ ID NO: 401; G.max_Glyma04g09100.1: SEQ ID NO: 355; G.max_Glyma06g09200.1: SEQ ID NO: 357; L.japonicus_TC35866: SEQ ID NO: 373; H.vulgare_TC188512: SEQ ID NO: 367; T.aestivum_c50845464@12237: SEQ ID NO: 421; T.aestivum_TC286642: SEQ ID NO: 419; O.sativa_LOC_Os09g17770.1: SEQ ID NO: 385; S.bicolor_Sb02g022620.1: SEQ ID NO: 409; Z.mays_TC471127: SEQ ID NO: 431; Siepidophylla_TA371_{—}59777: SEQ ID NO: 395; S.moellendorffii_{—}405582: SEQ ID NO: 397; P.taeda_TA15893_{—}3352: SEQ ID NO: 389; P.taeda_TA7909_{—}3352: SEQ ID NO: 391; H.vulgare_TC173170: SEQ ID NO: 365; T.aestivum_TC354489: SEQ ID NO: 417; Triae_Sawadee: SEQ ID NO: 411; O.sativa_LOC_Os06g29020.1: SEQ ID NO: 383; P.virgatum_TC41535: SEQ ID NO: 387; S.bicolor_Sb02g020940.1: SEQ ID NO: 407; Z.mays_TC461823: SEQ ID NO: 429; Z.mays_TC547075: SEQ ID NO: 427; Z.mays_ZM07MSbpsHQ57699334: SEQ ID NO: 435; Z.mays_c57699334gm030403: SEQ ID NO: 433; N.tabacum_TC61019: SEQ ID NO: 375; and Consensus: SEQ ID NO: 556.

[0464] FIG. 4 shows an example of a phylogenetic tree showing various homeodomain sequences with the SAWADEE group highlighted. The tree is taken from Mukherjee et al. (Mol. Biol. Evol. 26(12):2775-2794, 2009).

[0465] FIG. 5 represents the binary vector used for increased expression in Oryza sativa of a SAWADEE-like-encoding nucleic acid under the control of a rice GOS2 promoter (pGOS2).

[0466] FIG. 6 shows the MATGAT table (see Example 3) for the global similarity and identity over the full length of the SAWADEE-like polypeptide sequences. Sequence similarity is shown in the bottom half of the dividing line and sequence identity is shown in the top half of the diagonal dividing line. Parameters used in the comparison were: Scoring matrix: Blosum62, First Gap: 12, Extending Gap: 2.

[0467] FIG. 7 represents the domain structure of SEQ ID NO: 448 with the BTB/POZ domain in italics, motifs 7/10, 8/11 and 9/12 underlined and motifs 13, 14 and 15 in bold.

[0468] FIG. 8 represents a multiple alignment of various POZ-like polypeptides from Class 2 and Class 3. The asterisks indicate identical amino acids among the various protein sequences, colons represent highly conserved amino acid substitutions, and the dots represent less conserved amino acid substitution; on other positions there is no sequence conservation. These alignments can be used for defining further motifs, when using conserved amino acids. P.trichocarpa_{—}708145#1_CI-2: SEQ ID NO: 520; G.hirsutum_TC149255#1_CI-2: SEQ ID NO: 500; P.trifoliata_TA6970_{—}37690#1_CI: SEQ ID NO: 486; V.vinifera_GSVIVT00033478001#1: SEQ ID NO: 490; L.saligna_TA3172_{—}75948#1_CI-2: SEQ ID NO: 502; A.thaliana_AT1G55760.1#1_CI-2: SEQ ID NO: 504; A.lyrata_{—}924095#1_C1-2: SEQ ID NO: 506; G.max_Glyma08g44780.1#1_CI-2: SEQ ID NO: 492; M.truncatula_AC147712_{—}28.4#1_C: SEQ ID NO: 518; Aquilegia_sp_TC27739#1_CI-2: SEQ ID NO: 494; M.truncatula_CT963107_{—}29.4#1_C: SEQ ID NO: 510; T.aestivum_c54999055@16174#1_C: SEQ ID NO: 524; T.aestivum_POZ#1_CI-2: SEQ ID NO: 526; O.sativa_LOC_Os08g38700.1#1_CI: SEQ ID NO: 512; S.bicolor_Sb07g028630.1#1_CI-2: SEQ ID NO: 516; Z.mays_ZMO7MC18038_BFb0066023@: SEQ ID NO: 530; P.virgatum_TC35118#1_CI-2: SEQ ID NO: 514; M.truncatula_AC140916_{—}9.4#1_CI: SEQ ID NO: 480; G.max_Glyma06g12140.1#1_CI-3: SEQ ID NO: 482; G.max_Glyma13g03460.1#1_CI-3: SEQ ID NO: 454; G.max_GM06MC01238_{—}47161905 @122: SEQ ID NO: 458; V.vinifera_GSVIVT00015398001#1: SEQ ID NO: 460; Aquilegia_sp_TC23244#1_CI-3: SEQ ID NO: 538; S.lycopersicum_POZ#1_CI-3: SEQ ID NO: 448; C.tinctorius_TA1040_{—}4222#1_C1-: SEQ ID NO: 476; C.maculosa_TA4386_{—}215693#1_C1-: SEQ ID NO: 478; L.sativa_TC20555#1_CI-3: SEQ ID NO: 540; S.bicolor_Sb07g000460.1#1_CI-3: SEQ ID NO: 534; Z.mays_ZM07MC35229_BFb0380MO2@: SEQ ID NO: 536; P.virgatum_TC11703#1_CI-3: SEQ ID NO: 532; P.glauca_TA24854_{—}3330#1_CI-3: SEQ ID NO: 470; P.sitchensis_TA16752_{—}3332#1_CI: SEQ ID NO: 472; P.taeda_TA14818_{—}3352#1_CI-3: SEQ ID NO: 474; and P.patens_{—}130769#1_CI-2: SEQ ID NO: 508.

[0469] FIG. 9 shows phylogenetic tree of POZ-like polypeptides, (explanation of tree drawing). The proteins were aligned using MAFT (Katoh and Toh (2008). A neighbour-joining tree was calculated using QuickTree1.1 (Howe et al. (2002). A rectangular cladogram was drawn using Dendroscope2.0.1 (Huson et al. (2007). At e=1e-70, all representative members were recovered. The tree was generated using representative members of each cluster. SEQ ID NO: 448 is represented as S.lycopersicum_POZ#1_CI-3 and belongs to the C1-3 indicated in the tree.

[0470] FIG. 10 shows the MATGAT table of Class 3 POZ-like proteins (Example 3).

[0471] FIG. 11 represents the binary vector used for increased expression in Oryza sativa of a POZ-like-encoding nucleic acid under the control of a rice GOS2 promoter (pGOS2).

### EXAMPLES

[0472] The present invention will now be described with reference to the following examples, which are by way of illustration only. The following examples are not intended to limit the scope of the invention.

[0473] DNA manipulation: unless otherwise stated, recombinant DNA techniques are performed according to standard protocols described in (Sambrook (2001) Molecular Cloning: a laboratory manual, 3rd Edition Cold Spring Harbor Laboratory Press, CSH, New York) or in Volumes 1 and 2 of Ausubel et al. (1994), Current Protocols in Molecular Biology, Current Protocols. Standard materials and methods for plant molecular work are described in Plant Molecular Biology Labfax (1993) by R. D. D. Croy, published by BIOS Scientific Publications Ltd (UK) and Blackwell Scientific Publications (UK).

### Example 1

### Identification of Sequences Related to SEQ ID NO: 1 and SEQ ID NO: 2 or SEQ ID NO: 324 and SEQ ID NO: 325 or SEQ ID NO: 447 and SEQ ID NO:448

[0474] Sequences (full length cDNA, ESTs or genomic) related to SEQ ID NO: 1 and SEQ ID NO: 2 or SEQ ID NO: 324 and SEQ ID NO: 325 or SEQ ID NO: 447 and SEQ ID NO:448 were identified amongst those maintained in the Entrez Nucleotides database at the National Center for Biotechnology Information (NCBI) using database sequence search tools, such as the Basic Local Alignment Tool (BLAST) (Altschul et al. (1990) J. Mol. Biol. 215:403-410; and Altschul et al. (1997) Nucleic Acids Res. 25:3389-3402). The program is used to find regions of local similarity between sequences by comparing nucleic acid or polypeptide sequences to sequence databases and by calculating the statistical significance of matches. For example, the polypeptide encoded by the nucleic acid of SEQ ID NO: 1 or SEQ ID NO: 324 or SEQ ID NO: 447 was used for the TBLASTN algorithm, with default settings and the filter to ignore low complexity sequences set off. The output of the analysis was viewed by pairwise comparison, and ranked according to the probability score (E-value), where the score reflect the probability that a particular alignment occurs by chance (the lower the E-value, the more significant the hit). In addition to E-values, comparisons were also scored by percentage identity. Percentage identity refers to the number of identical nucleotides (or amino acids) between the two compared nucleic acid (or polypeptide) sequences over a particular length. In some instances, the default parameters may be adjusted to modify the stringency of the search. For example the E-value may be increased to show less stringent matches. This way, short nearly exact matches may be identified.

[0475] Table A1 provides a list of nucleic acid sequences related to SEQ ID NO: 1 and SEQ ID NO: 2.

TABLE A1
Examples of WIL nucleic acids and polypeptides:

| | Nucleic | |
|---|---|---|
| | acid | Protein |
| | SEQ | SEQ |
| Plant Source | ID NO: | ID NO: |
| O.sativa_LOC_Os05g27590.1 | 1 | 2 |
| A.aestivalis_2721 | 3 | 4 |
| A.lyrata_928811 | 5 | 6 |
| A.majus_TA6818_4151 | 7 | 8 |
| A.thaliana_AT3G10985_SAG20 | 9 | 10 |
| B.napus_TC66358 | 11 | 12 |
| B.napus_TC90195 | 13 | 14 |
| B.oleracea_EH418308 | 15 | 16 |
| B.oleracea_TA5828_3712 | 17 | 18 |
| C.annuum_TC20360 | 19 | 20 |
| C.canephora_TC544 | 21 | 22 |
| C.clementina_TC31489 | 23 | 24 |
| C.intybus_TA2652_13427 | 25 | 26 |
| C.longa_TA28_136217 | 27 | 28 |
| C.longa_TA415_136217 | 29 | 30 |
| C.sinensis_TC10883 | 31 | 32 |
| C.solstitialis_EH779943 | 33 | 34 |
| C.solstitialis_EH784157 | 35 | 36 |
| C.solstitialis_EH784275 | 37 | 38 |
| C.solstitialis_TA2931_347529 | 39 | 40 |
| C.solstitialis_TA5207_347529 | 41 | 42 |
| C.tinctorius_EL411491 | 43 | 44 |
| C.tinctorius_TA3761_4222 | 45 | 46 |
| E.esula_TC4729 | 47 | 48 |
| E.tirucalli_TA2125_142860 | 49 | 50 |
| F.vesca_TA9047_57918 | 51 | 52 |
| G.arboreum_TA7168_29729 | 53 | 54 |
| G.hirsutum_TC160651 | 55 | 56 |
| G.hirsutum_TC174043 | 57 | 58 |
| G.max_Glyma11g35800.1 | 59 | 60 |
| G.max_Glyma14g38040.1 | 61 | 62 |
| G.max_Glyma18g02610.1 | 63 | 64 |
| G.max_Glyma18g06340.1 | 65 | 66 |
| G.raimondii_TC981 | 67 | 68 |
| H.annuus_TC39814 | 69 | 70 |
| H.annuus_TC54842 | 71 | 72 |
| H.exilis_TA2428_400408 | 73 | 74 |
| H.paradoxus_EL485276 | 75 | 76 |
| H.petiolaris_DY954048 | 77 | 78 |
| H.petiolaris_TA817_4234 | 79 | 80 |
| I.batatas_TA1754_4120 | 81 | 82 |
| I.batatas_X17553 | 83 | 84 |
| I.nil_TC7046 | 85 | 86 |
| J.regia_TA765_51240 | 87 | 88 |
| J.regia_TA930_51240 | 89 | 90 |
| L.albus_CA411392 | 91 | 92 |
| L.bicolor_TA1713_293754 | 93 | 94 |
| L.japonicus_TC37474 | 95 | 96 |
| L.perennis_DW102473 | 97 | 98 |
| L.sativa_BQ870888 | 99 | 100 |
| M.acuminata_ES432927 | 101 | 102 |
| M.acuminata_ES434998 | 103 | 104 |
| M.crystallinum_AF117224 | 105 | 106 |
| M.domestica_TC30277 | 107 | 108 |
| M.domestica_TC32472 | 109 | 110 |
| M.esculenta_TA5785_3983 | 111 | 112 |
| M.guttatus_CV516184 | 113 | 114 |
| M.sativa_TA1932_3879 | 115 | 116 |
| M.truncatula_AC149303_43.4 | 117 | 118 |
| M.truncatula_CR932960_8.4 | 119 | 120 |
| N.tabacum_TC50261 | 121 | 122 |
| N.tabacum_TC55413 | 123 | 124 |
| O.basilicum_TA3074_39350 | 125 | 126 |
| P.armeniaca_TA3431_36596 | 127 | 128 |
| P.canadensis_CX177496 | 129 | 130 |
| P.deltoides_TA2827_3696 | 131 | 132 |
| P.euphratica_TA3343_75702 | 133 | 134 |
| P.ginseng_TA610_4054 | 135 | 136 |
| P.hybrida_CV295832 | 137 | 138 |
| P.hybrida_TC1978 | 139 | 140 |
| P.juliflora_TA123_13230 | 141 | 142 |
| P.persica_BU048459 | 143 | 144 |
| P.trichocarpa_656319 | 145 | 146 |
| P.trichocarpa_659435 | 147 | 148 |
| P.trifoliata_TA5394_37690 | 149 | 150 |
| P.vulgaris_FE899406 | 151 | 152 |
| P.vulgaris_TC15039 | 153 | 154 |
| R.communis_B9S498 | 155 | 156 |
| R.communis_B9S499 | 157 | 158 |
| S.habrochaites_DN170643 | 159 | 160 |
| S.habrochaites_TA2428_62890 | 161 | 162 |
| S.henryi_DT578160 | 163 | 164 |
| S.lycopersicum_TC193018 | 165 | 166 |
| S.lycopersicum_TC198624 | 167 | 168 |
| S.pennellii_AW618204 | 169 | 170 |
| S.tuberosum_TC166671 | 171 | 172 |
| S.tuberosum_TC192723 | 173 | 174 |
| T.hispida_TA1874_189793 | 175 | 176 |
| T.kok-saghyz_TA1355_333970 | 177 | 178 |
| T.salsuginea_TA1700_72664 | 179 | 180 |
| V.vinifera_GSVIVT00023990001 | 181 | 182 |
| V.vinifera_GSVIVT00029390001 | 183 | 184 |
| Z.aethiopica_TA1298_69721 | 185 | 186 |
| Z.officinale_TA5741_94328 | 187 | 188 |
| Z.officinale_TA676_94328 | 189 | 190 |
| A.lyrata_486893 | 191 | 192 |
| A.thaliana_AT5G01740 | 193 | 194 |
| B.napus_TC103407 | 195 | 196 |
| B.oleracea_AM388237 | 197 | 198 |
| C.japonica_BW996295 | 199 | 200 |
| C.sinensis_EY757300 | 201 | 202 |
| C.solstitialis_TA4582_347529 | 203 | 204 |
| Closterium_peracerosum_AU295957 | 205 | 206 |
| F.arundinacea_TC7405 | 207 | 208 |
| F.vesca_TA12299_57918 | 209 | 210 |
| G.max_Glyma03g05050.1 | 211 | 212 |
| G.max_Glyma09g41610.1 | 213 | 214 |
| G.max_Glyma11g29740.1 | 215 | 216 |
| G.max_Glyma18g06350.1 | 217 | 218 |
| G.max_Glyma18g44090.1 | 219 | 220 |
| H.annuus_TC50100 | 221 | 222 |
| H.exilis_EE632046 | 223 | 224 |
| H.vulgare_TC169048 | 225 | 226 |
| H.vulgare_TC175697 | 227 | 228 |
| M.domestica_TC38268 | 229 | 230 |
| M.domestica_TC41353 | 231 | 232 |
| M.polymorpha_TA1396_3197 | 233 | 234 |
| N.benthamiana_TC15798 | 235 | 236 |
| N.tabacum_TC64094 | 237 | 238 |
| O.sativa_LOC_Os03g18770.1 | 239 | 240 |
| O.sativa_LOC_Os05g27580.1 | 241 | 242 |
| O.sativa_LOC_Os07g49114.1 | 243 | 244 |
| P.coccineus_TA4345_3886 | 245 | 246 |
| P.glauca_DR576888 | 247 | 248 |
| P.glauca_TA17913_3330 | 249 | 250 |
| P.patens_122265 | 251 | 252 |
| P.patens_146634 | 253 | 254 |
| P.patens_152838 | 255 | 256 |
| P.pinaster_TA4600_71647 | 257 | 258 |
| P.sitchensis_DR529510 | 259 | 260 |
| P.taeda_CO170924 | 261 | 262 |
| P.taeda_CX651380 | 263 | 264 |
| P.taeda_TA17097_3352 | 265 | 266 |
| P.taeda_TA18669_3352 | 267 | 268 |
| P.taeda_TA25386_3352 | 269 | 270 |
| P.taeda_TA4810_3352 | 271 | 272 |
| P.trichocarpa_777966 | 273 | 274 |
| P.trichocarpa_SAG20 | 275 | 276 |
| P.virgatum_TC23827 | 277 | 278 |
| P.virgatum_TC28852 | 279 | 280 |
| P.virgatum_TC33105 | 281 | 282 |
| P.virgatum_TC49878 | 283 | 284 |
| P.vulgaris_TC12329 | 285 | 286 |
| S.bicolor_Sb01g038030.1 | 287 | 288 |
| S.bicolor_Sb02g043820.1 | 289 | 290 |
| S.bicolor_Sb09g015680.1 | 291 | 292 |
| S.lepidophylla_TA463_59777 | 293 | 294 |
| S.moellendorffii_73443 | 295 | 296 |
| S.officinarum_CA086848 | 297 | 298 |
| S.officinarum_CA152035 | 299 | 300 |
| T.aestivum_TC305004 | 301 | 302 |
| T.caerulescens_DN925238 | 303 | 304 |
| T.ruralis_CN207101 | 305 | 306 |
| T.turgidum_AJ717244 | 307 | 308 |
| V.vinifera_GSVIVT00037433001 | 309 | 310 |
| Z.mays_CO468178 | 311 | 312 |
| Z.mays_TC460886 | 313 | 314 |
| Z.mays_TC474665 | 315 | 316 |

[0476] Table A2 provides a list of nucleic acid sequences related to SEQ ID NO: 324 and SEQ ID NO: 325.

TABLE A2
Examples of SAWADEE-LIKE nucleic acids and polypeptides:

| | Nucleic | |
|---|---|---|
| | acid | Protein |
| | SEQ | SEQ |
| Plant Source | ID NO: | ID NO: |
| Poptr_SAWADEE | 324 | 325 |
| Aquilegia_sp_TC20929 | 326 | 327 |
| A.lyrata_334813 | 328 | 329 |
| A.thaliana_AT3G18380.1 | 330 | 331 |
| A.thaliana_AT3G18380.2 | 332 | 333 |
| A.thaliana_AT1G15215.3 | 334 | 335 |
| B.napus_TC87129 | 336 | 337 |
| B.napus_BN06MC05266_42322866@5253 | 338 | 339 |
| B.oleracea_TA11471_3712 | 340 | 341 |
| C.annuum_TC19347 | 342 | 343 |
| C.maculosa_TA3277_215693 | 344 | 345 |
| C.solstitialis_TA4707_347529 | 346 | 347 |
| F.vesca_TA9550_57918 | 348 | 349 |
| G.max_Glyma06g35560.1 | 350 | 351 |
| G.max_Glyma12g18490.1 | 352 | 353 |
| G.max_Glyma04g09100.1 | 354 | 355 |
| G.max_Glyma06g09200.1 | 356 | 357 |
| G.max_Glyma07g01880.1 | 358 | 359 |
| G.max_Glyma08g21560.1 | 360 | 361 |
| G.hirsutum_TC160629 | 362 | 363 |
| H.vulgare_TC173170 | 364 | 365 |
| H.vulgare_TC188512 | 366 | 367 |
| I.nil_TC11734 | 368 | 369 |
| L.perennis_TA4007_43195 | 370 | 371 |
| L.japonicus_TC35866 | 372 | 373 |
| N.tabacum_TC61019 | 374 | 375 |
| N.tabacum_TC73014 | 376 | 377 |
| N.tabacum_TC63901 | 378 | 379 |
| O.basilicum_TA1574_39350 | 380 | 381 |
| O.sativa_LOC_Os06g29020.1 | 382 | 383 |
| O.sativa_LOC_Os09g17770.1 | 384 | 385 |
| P.virgatum_TC41535 | 386 | 387 |
| P.taeda_TA15893_3352 | 388 | 389 |
| P.taeda_TA7909_3352 | 390 | 391 |
| P.trichocarpa_829564 | 392 | 393 |
| S.lepidophylla_TA371_59777 | 394 | 395 |
| S.moellendorffii_405582 | 396 | 397 |
| S.moellendorffii_411966 | 398 | 399 |
| S.lycopersicum_TC216862 | 400 | 401 |
| S.lycopersicum_TC192705 | 402 | 403 |
| S.tuberosum_TC191509 | 404 | 405 |
| S.bicolor_Sb02g020940.1 | 406 | 407 |
| S.bicolor_Sb02g022620.1 | 408 | 409 |
| Triae_SAWADEE_like | 410 | 411 |
| Triphysaria_sp_TC5080 | 412 | 413 |
| Triphysaria_sp_TC5234 | 414 | 415 |
| T.aestivum_TC354489 | 416 | 417 |
| T.aestivum_TC286642 | 418 | 419 |
| T.aestivum_c50845464@12237 | 420 | 421 |
| V.vinifera_GSVIVT00034323001 | 422 | 423 |
| V.vinifera_GSVIVT00032090001 | 424 | 425 |
| Z.mays_TC547075 | 426 | 427 |
| Z.mays_TC461823 | 428 | 429 |
| Z.mays_TC471127 | 430 | 431 |
| Z.mays_c57699334gm030403@2933 | 432 | 433 |
| Z.mays_ZM07MSbpsHQ_57699334.f01@39738 | 434 | 435 |
| Z.mays_ZM07MSbpsHQ_59186353.f01@41850 | 436 | 437 |

[0477] Table A3 provides a list of nucleic acid sequences related to SEQ ID NO: 447 and SEQ ID NO: 448.

TABLE A3
Examples of POZ-like nucleic acids and polypeptides:

| | Nucleic | Poly- |
|---|---|---|
| | acid | peptide |
| | SEQ | SEQ |
| Plant source | ID NO: | ID NO: |
| S.lycopersicum_POZ#1 | 447 | 448 |
| G.hirsutum_TC133052#1 | 449 | 450 |
| P.trichocarpa_754573#1 | 451 | 452 |
| G.max_Glyma13g03460.1#1 | 453 | 454 |
| G.max_Glyma14g23960.1#1 | 455 | 456 |
| G.max_GM06MC01238_47161905@1229#1 | 457 | 458 |
| V.vinifera_GSVIVT00015398001#1 | 459 | 460 |
| G.raimondii_TC476#1 | 461 | 462 |
| B.napus_TC69247#1 | 463 | 464 |
| A.lyrata_921163#1 | 465 | 466 |
| A.thaliana_AT1G21780.1#1 | 467 | 468 |
| P.glauca_TA24854_3330#1 | 469 | 470 |
| P.sitchensis_TA16752_3332#1 | 471 | 472 |
| P.taeda_TA14818_3352#1 | 473 | 474 |
| C.tinctorius_TA1040_4222#1 | 475 | 476 |
| C.maculosa_TA4386_215693#1 | 477 | 478 |
| M.truncatula_AC140916_9.4#1 | 479 | 480 |
| G.max_Glyma06g12140.1#1 | 481 | 482 |
| G.hirsutum_TC152147#1 | 483 | 484 |
| P.trifoliata_TA6970_37690#1 | 485 | 486 |
| G.max_Glyma18g08140.1#1 | 487 | 488 |
| V.vinifera_GSVIVT00033478001#1 | 489 | 490 |
| G.max_Glyma08g44780.1#1 | 491 | 492 |
| Aquilegia_sp_TC27739#1 | 493 | 494 |
| S.lycopersicum_TC192422#1 | 495 | 496 |
| G.raimondii_TC4519#1 | 497 | 498 |
| G.hirsutum_TC149255#1 | 499 | 500 |
| L.saligna_TA3172_75948#1 | 501 | 502 |
| A.thaliana_AT1G55760.1#1 | 503 | 504 |
| A.lyrata_924095#1 | 505 | 506 |
| P.patens_130769#1 | 507 | 508 |
| M.truncatula_CT963107_29.4#1 | 509 | 510 |
| O.sativa_LOC_Os08g38700.1#1 | 511 | 512 |
| P.virgatum_TC35118#1 | 513 | 514 |
| S.bicolor_Sb07g028630.1_#1 | 515 | 516 |
| M.truncatula_AC147712_28.4#1 | 517 | 518 |
| P.trichocarpa_708145#1 | 519 | 520 |
| Os_BTB_POZ | 521 | 522 |
| T.aestivum_c54999055@16174#1 | 523 | 524 |
| T.aestivum_POZ#1 | 525 | 526 |
| T.aestivum_TC308191#1 | 527 | 528 |
| Z.mays_ZM07MC18038_BFb0066O23@17991#1 | 529 | 530 |
| P.virgatum_TC11703#1 | 531 | 532 |
| S.bicolor_Sb07g000460.1#1 | 533 | 534 |
| Z.mays_ZM07MC35229_BFb0380M02@35122#1 | 535 | 536 |
| Aquilegia_sp_TC23244#1 | 537 | 538 |
| L.sativa_TC20555#1 | 539 | 540 |
| O.sativa_LOC_Os08g01320.1#1 | 541 | 542 |

[0478] Sequences have been tentatively assembled and publicly disclosed by research institutions, such as The Institute for Genomic Research (TIGR; beginning with TA). For instance, the Eukaryotic Gene Orthologs (EGO) database may be used to identify such related sequences, either by keyword search or by using the BLAST algorithm with the nucleic acid sequence or polypeptide sequence of interest. Special nucleic acid sequence databases have been created for particular organisms, e.g. for certain prokaryotic organisms, such as by the Joint Genome Institute. Furthermore, access to proprietary databases, has allowed the identification of novel nucleic acid and polypeptide sequences.

### Example 2

### Alignment of WIL Polypeptide Sequences

[0479] Alignment of polypeptide sequences can be performed using the ClustalW (1.83 or 2.0) algorithm of progressive alignment (Thompson et al. (1997) Nucleic Acids Res 25:4876-4882; Chenna et al. (2003). Nucleic Acids Res 31:3497-3500) with standard setting (slow alignment, similarity matrix: Gonnet (or Blosum 62 (if polypeptides are aligned)), gap opening penalty 10, gap extension penalty: 0.2). Minor manual editing can be done to further optimise the alignment.

[0480] A phylogenetic tree of WIL polypeptides can be constructed using a neighbour-joining clustering algorithm as provided in the AlignX programme from the Vector NTI (Invitrogen).

[0481] The alignment can be generated using MAFFT (Katoh and Toh (2008)—Briefings in Bioinformatics 9:286-298). A neighbour-joining tree can be calculated using Quick-Tree (Howe et al. (2002), Bioinformatics 18(11): 1546-7), 100 bootstrap repetitions. The circular phylogram can be drawn using Dendroscope (Huson et al. (2007), BMC Bioinformatics 8(1):460). Confidence for e.g. bootstrap repetitions can be indicated for major branching.

[0482] Alignment of SAWADEE-LIKE Polypeptide Sequences

[0483] Alignment of polypeptide sequences was performed using AlignX programme from the Vector NTI (Invitrogen) with standard settings. Minor manual editing was done to further optimise the alignment. The SAWADEE-like polypeptides are aligned in FIG. 3.

[0484] A phylogenetic tree of SAWADEE-like polypeptides may be constructed using a neighbour-joining clustering algorithm as provided in the AlignX program. The phylogenetic tree shown in FIG. 4 is taken from Mukherjee et al. (Mol. Biol. Evol. 26(12):2775-2794, 2009).

[0485] Alignment of POZ-Like Polypeptide Sequences

[0486] Alignment of polypeptide sequences was performed using the ClustalW 2.0 algorithm of progressive alignment (Thompson et al. (1997) Nucleic Acids Res 25:4876-4882; Chenna et al. (2003). Nucleic Acids Res 31:3497-3500) with standard setting (slow alignment, similarity matrix: Gonnet, gap opening penalty 10, gap extension penalty: 0.2). Minor manual editing was done to further optimise the alignment. The POZ-like polypeptides of Class 2 and Class 3 (see FIG. 9) are aligned in FIG. 8.

[0487] A phylogenetic tree of POZ-like polypeptides (FIG. 9) was constructed by aligning POZ-like sequences using MAFFT (Katoh and Toh (2008)—Briefings in Bioinformatics 9:286-298). A neighbour-joining tree was calculated using Quick-Tree (Howe et al. (2002), Bioinformatics 18(11): 1546-7), 100 bootstrap repetitions. The dendrogram was drawn using Dendroscope (Huson et al. (2007), BMC Bioinformatics 8(1):460). Confidence levels for 100 bootstrap repetitions are indicated for major branchings.

### Example 3

### Calculation of Global Percentage Identity Between Polypeptide Sequences

[0488] Global percentages of similarity and identity between full length polypeptide sequences useful in performing the methods of the invention can be determined using one of the methods available in the art, the MatGAT (Matrix Global Alignment Tool) software (BMC Bioinformatics. 2003 4:29. MatGAT: an application that generates similarity/identity matrices using protein or DNA sequences. Campanella J J, Bitincka L, Smalley J; software hosted by Ledion Bitincka). MatGAT software generates similarity/identity matrices for DNA or protein sequences without needing pre-alignment of the data. The program performs a series of pair-wise alignments using the Myers and Miller global alignment algorithm (e.g. with a gap opening penalty of 12, and a gap extension penalty of 2), calculates similarity and identity using for example Blosum 62 (for polypeptides), and then places the results in a distance matrix.

[0489] In such a MatGAT table, sequence similarity can be shown in the bottom half of the dividing line and sequence identity can be shown in the top half of the diagonal dividing line. An example of parameters which can be used in the comparison are: Scoring matrix: Blosum62, First Gap: 12, Extending Gap: 2.

[0490] Results of the software analysis for SAWADEE-like polypeptide sequences are shown in

[0491] FIG. 6 for the global similarity and identity over the full length of the polypeptide sequences. Sequence similarity is shown in the bottom half of the dividing line and sequence identity is shown in the top half of the diagonal dividing line. Parameters used in the comparison were: Scoring matrix: Blosum62, First Gap: 12, Extending Gap: 2.

[0492] A MATGAT table for local alignment of a specific domain, or data on % identity/similarity between specific domains may also be generated in the same way as for the global alignment.

[0493] Results of the analysis for POZ-like polypeptide sequences are shown in FIG. 10 for the global similarity and identity over the full length of the polypeptide sequences belonging to Class 3. Sequence similarity is shown in the bottom half of the dividing line and sequence identity is shown in the top half of the diagonal dividing line. Parameters used in the comparison were: Scoring matrix: Blosum62, First Gap: 12, Extending Gap: 2. The sequence identity (in %) between the POZ-like polypeptide sequences within Class 3 can be as low as 58% but is generally higher than 64% compared to SEQ ID NO: 2. Within classes 2 and 3, the sequence identity can be as low as 40%.

### Example 4

### Identification of Domains Comprised in Polypeptide Sequences Useful in Performing the Methods of the Invention

[0494] The Integrated Resource of Protein Families, Domains and Sites (InterPro) database is an integrated interface for the commonly used signature databases for text- and sequence-based searches. The InterPro database combines these databases, which use different methodologies and varying degrees of biological information about well-characterized proteins to derive protein signatures. Collaborating databases include SWISS-PROT, PROSITE, TrEMBL, PRINTS, ProDom and Pfam, Smart and TIGRFAMs. Pfam is a large collection of multiple sequence alignments and hidden Markov models covering many common protein domains and families. Pfam is hosted at the Sanger Institute server in the United Kingdom. Interpro is hosted at the European Bioinformatics Institute in the United Kingdom.

[0495] The results of the InterPro scan of the polypeptide sequence as represented by SEQ ID NO: 2 are presented in Table B1.

TABLE B1
InterPro scan results (major accession numbers) of the
polypeptide sequence as represented by SEQ ID NO: 2.

| | | | Amino acid |
|---|---|---|---|
| | | | coordinates on |
| | | | SEQ ID NO 2: |
| | | | e-value [amino |
| | Accession | Accession | acid position of |
| Method | number | name | the domain] |
| Superfamily | SSF54427 | NTF2-like | 2.2e−18 [12-136] |
| HMMPfam | PF07107 | WI12 | 4.7e−24 [60-177] |
| Gene3D | G3DSA:3.10.450.50 | No | 1.9e−06 [13-121] |
| | | description | |

[0496] In an embodiment a WIL polypeptide comprises a conserved domain (or motif) with at least 70%, 71%, 72%, 73%, 74%, 75%, 76%, 77%, 78%, 79%, 80%, 81%, 82%, 83%, 84%, 85%, 86%, 87%, 88%, 89%, 90%, 91%, 92%, 93%, 94%, 95%, 96%, 97%, 98%, or 99% sequence identity to a conserved domain of amino acid coordinates 60 to 177 of SEQ ID NO:2.

[0497] The results of the InterPro scan (major accession numbers) of the polypeptide sequence as represented by SEQ ID NO: 325 are shown below.

[0498] The results of the InterPro scan (InterPro database, release 28.0) of the polypeptide sequence as represented by SEQ ID NO: 448 are presented in Table B2.

TABLE B2
InterPro scan results (major accession numbers) of the
polypeptide sequence as represented by SEQ ID NO: 448.

| Interpro ID | Domain ID | Domain name | Short Name | Location |
|---|---|---|---|---|
| IPR000210 | SM00225 | BTB/POZ-like | BTB | 1.8e−17 [163-261]T |
| | SMART | | | |
| | PS50097 | BTB/POZ-like | BTB | 16.383 [163-222]T |
| | PROFILE | | | |
| IPR011333 | G3DSA:3.30.710.10 | BTB/POZ fold | No description | 2.9e−21 [147-257]T |
| | GENE3D | | | |
| | SSF54695 | BTB/POZ fold | POZ domain | 1.2e−23 [138-260]T |
| | SUPERFAMILY | | | |
| IPR013069 | PF00651 | BTB/POZ | BTB | 6.2e−22 [155-259]T |
| | PFAM | | | |
| IPR013089 | PTHR23230 | KELCH-RELATED | Kelch related | 7.3e−58 [174-317]T |
| | PANTHER | PROTEIN | | |
| noIPR | PTHR23230:SF190 | unintegrated | uncharacterized | 7.3e−58 [174-317]T |
| unintegrated | PANTHER | | | |

[0499] In an embodiment a POZ-like polypeptide comprises a conserved domain (or motif) with at least 70%, 71%, 72%, 73%, 74%, 75%, 76%, 77%, 78%, 79%, 80%, 81%, 82%, 83%, 84%, 85%, 86%, 87%, 88%, 89%, 90%, 91%, 92%, 93%, 94%, 95%, 96%, 97%, 98%, or 99% sequence identity to a conserved domain from amino acid 155 to 259 in SEQ ID NO:448.

### Example 5

### Topology Prediction of the WIL Polypeptide or SAWADEE-LIKE Polypeptide or POZ-Like Polypeptide Sequences

[0500] TargetP 1.1 predicts the subcellular location of eukaryotic proteins. The location assignment is based on the predicted presence of any of the N-terminal pre-sequences: chloroplast transit peptide (cTP), mitochondrial targeting peptide (mTP) or secretory pathway signal peptide (SP). Scores on which the final prediction is based are not really probabilities, and they do not necessarily add to one. However, the location with the highest score is the most likely according to TargetP, and the relationship between the scores (the reliability class) may be an indication of how certain the prediction is. The reliability class (RC) ranges from 1 to 5, where 1 indicates the strongest prediction. TargetP is maintained at the server of the Technical University of Denmark.

[0501] For the sequences predicted to contain an N-terminal presequence a potential cleavage site can also be predicted.

[0502] A number of parameters can be selected, such as organism group (non-plant or plant), cutoff sets (none, predefined set of cutoffs, or user-specified set of cutoffs), and the calculation of prediction of cleavage sites (yes or no).

[0503] The results of TargetP 1.1 analysis of the polypeptide sequence as represented by SEQ ID NO: 2 are shown below. The “plant” organism group has been selected, no cutoffs defined, and the predicted length of the transit peptide requested. The subcellular localization of the polypeptide sequence as represented by SEQ ID NO: 2 is likely nuclear.

TargetP 1.1 Server-prediction results
Technical University of Denmark
### targetp v1.1 prediction results #####################
#############
Number of query sequences: 1
Cleavage site predictions included.
Using PLANT networks.

| Name | Len | cTP | mTP | SP | other | Loc | RC | TPlen |
|---|---|---|---|---|---|---|---|---|
| Sequence | 390 | 0.016 | 0.423 | 0.026 | 0.810 | — | 4 | — |
| cutoff | | 0.000 | 0.000 | 0.000 | 0.000 | | | |

```
2) PSORT—Prediction of Protein Localization Sites
version 6.4(WWW)
MYSEQ  390 Residues
Species classification: 5
*** Reasoning Step: 1
Preliminary Calculation of ALOM (threshold: 0.5)
    count: 1
    Position of the most N-terminal TMS: 352 at i=1
MTOP: membrane topology (Hartmann et al.)
    I(middle): 359 Charge diffirence(C-N): 2.0
McG: Examining signal sequence (McGeoch)
    Length of UR: 9
    Peak Value of UR: −0.03
    Net Charge of CR: 1
    Discriminant Score: −14.97
GvH: Examining signal sequence (von Heijne)
    Signal Score (−3.5): −4.39
    Possible cleavage site: 49
>>> Seems to have no N-terminal signal seq.
Amino Acid Composition of Predicted Mature Form:
    calculated from 1
ALOM new cnt: 0 ** thrshld changed to −2
Cleavable signal was detected in ALOM?: 0B
ALOM: finding transmembrane regions (Klein et al.)
    count: 0 value: −0.80 threshold: −2.0
    PERIPHERAL Likelihood = −0.80
    modified ALOM score: −0.74
Gavel: Examining the boundary of mitochondrial targeting seq.
    motif at: 15
    FRFMQY
Discrimination of mitochondrial target seq.:
    negative (−4.55)
Hydrophobic moment analysis for chloroplast proteins
    Hmax: 11.17 at (52)
Disc.Score from Amino Acid Composition (chloroplast)
    score from the 3-11 region: −0.92
    score from the 1-31 region: 5.19
Chloroplast protein? Status: negative (−7.32)
*** Reasoning Step: 2
KDEL Count: 0
Checking apolar signal for intramitochondrial sorting
Mitochondrial matrix? Score: 0.10
Checking apolar signal for intrachloroplastic sorting
Howe: Checking the consensus for intrachloropl.sorting
Chloroplast thylakoid memb.? Score: 0.100
SKL motif (signal for peroxisomal protein):
    pos: −1(390), count: 0
Amino Acid Composition Tendency for Peroxisome: −2.50
Peroxisomal proteins? Status: negative
Amino acid composition tendency for vacuolar proteins
    Score: −5.67 Status: negative
Checking the amount of Basic Residues (nucleus)
Checking the 4 residue pattern for Nuclear Targeting
    Found: pos: 229 (3) RRRH
Checking the 7 residue pattern for Nuclear Targeting
Checking the Robbins & Dingwall consensus (nucleus)
Checking the RNA binding motif (nucleus or cytoplasm)
nuc modified. Score: 0.60
Nuclear Signal Status: notclr ( 0.30)
Checking CaaX motif . .
Checking N-myristoylation . .
Checking CaaX motif . .
----- Final Results -----
nucleus  --- Certainty = 0.300(Affirmative) < succ>
mitochondrial space  --- Certainty = 0.100(Affirmative) < succ>
thylakoid membrane --- Certainty = 0.100(Affirmative) < succ>
ER (membrane)  --- Certainty = 0.000(Not Clear) < succ>
```

[0504] The results of TargetP 1.1 analysis of the polypeptide sequence as represented by SEQ ID NO: 448 are presented Table C. The “plant” organism group has been selected, no cutoffs defined, and the predicted length of the transit peptide requested. The subcellular localization of the polypeptide sequence as represented by SEQ ID NO: 448 may be the cytoplasm or nucleus, no transit peptide is predicted.

TABLE C
TargetP 1.1 analysis of the polypeptide sequence as represented by
SEQ ID NO: 448. Abbreviations: Len, Length; cTP,
Chloroplastic transit peptide; mTP, Mitochondrial
transit peptide, SP, Secretory pathway signal peptide,
other, Other subcellular targeting, Loc, Predicted Location; RC,
Reliability class; TPlen, Predicted transit peptide length.

| Name | Len | cTP | mTP | SP | other | Loc | RC | TPlen |
|---|---|---|---|---|---|---|---|---|
| SEQ ID NO:2 | 328 | 0.076 | 0.187 | 0.020 | 0.833 | — | 2 | — |
| cutoff | | 0.000 | 0.000 | 0.000 | 0.000 | | | |

[0505] Any other algorithms can be used to perform such analyses, including:
[0506] ChloroP 1.1 hosted on the server of the Technical University of Denmark;
[0507] Protein Prowler Subcellular Localisation Predictor version 1.2 hosted on the server of the Institute for Molecular Bioscience, University of Queensland, Brisbane, Australia;
[0508] PENCE Proteome Analyst PA-GOSUB 2.5 hosted on the server of the University of Alberta, Edmonton, Alberta, Canada;
[0509] TMHMM, hosted on the server of the Technical University of Denmark
[0510] PSORT (URL: psort.org)
[0511] PLOC (Park and Kanehisa, Bioinformatics, 19, 1656-1663, 2003).

### Example 6

### Cloning of the WIL Encoding Nucleic Acid Sequence

[0512] The nucleic acid sequence was amplified by PCR using as template a custom-made Oryza sativa seedlings cDNA library. PCR was performed using Hifi Taq DNA polymerase in standard conditions, using 200 ng of template in a 50 μl PCR mix. The primers used were prm15407 (SEQ ID NO: 322; sense): 5′-ggggacaagtttgtacaaaaaagcaggcttaaacaatggccatgg agttggaa-3′ and prm15408 (SEQ ID NO: 323; reverse, complementary): 5′-ggggaccac tttgtacaagaaagctgggtcacgtgtcagatggcgag-3′, which include the AttB sites for Gateway recombination. The amplified PCR fragment was purified also using standard methods. The first step of the Gateway procedure, the BP reaction, was then performed, during which the PCR fragment recombined in vivo with the pDONR201 plasmid to produce, according to the Gateway terminology, an “entry clone”, pWIL. Plasmid pDONR201 was purchased from Invitrogen, as part of the Gateway® technology.

[0513] Cloning of the SAWADEE-LIKE Encoding Nucleic Acid Sequence

[0514] The nucleic acid sequence was amplified by PCR using as template a Populus trichocarpa library. PCR was performed using Hifi Taq DNA polymerase in standard conditions, using 200 ng of template in a 50 μl PCR mix. The primers used were prm14262 (SEQ ID NO: 445; sense, start codon in bold): 5′-ggggacaagtttgtacaaaaaagcaggcttaaacaatgggtcgtcctccc agt-3′ and prm14263 (SEQ ID NO: 446; reverse, complementary): 5′-ggggaccactttgtaca agaaagctgggttgaaacagagcagctatcaagg-3′, which include the AttB sites for Gateway recombination. The amplified PCR fragment was purified also using standard methods. The first step of the Gateway procedure, the BP reaction, was then performed, during which the PCR fragment recombined in vivo with the pDONR201 plasmid to produce, according to the Gateway terminology, an “entry clone”, pSAWADEE-like. Plasmid pDONR201 was purchased from Invitrogen, as part of the Gateway® technology.

[0515] Cloning of the POZ-Like Encoding Nucleic Acid Sequence

[0516] The nucleic acid sequence was amplified by PCR using as template a custom-made Lycopersicon esculentum seedlings cDNA library. PCR was performed using a commercially available proofreading Taq DNA polymerase in standard conditions, using 200 ng of template in a 50 μl PCR mix. The primers used were prm17159 (SEQ ID NO: 554; sense, start codon in bold): 5′-ggggacaagtttgtacaaaaaagcaggcttaaacaatgacaga cagcaaggtagag-3′ and prm17160 (SEQ ID NO: 555; reverse, complementary): 5′-ggggaccactttgtacaagaaagctgggtatacaactatggcaaaaacct-3′, which include the AttB sites for Gateway recombination. The amplified PCR fragment was purified also using standard methods. The first step of the Gateway procedure, the BP reaction, was then performed, during which the PCR fragment recombined in vivo with the pDONR201 plasmid to produce, according to the Gateway terminology, an “entry clone”, pPOZ-like. Plasmid pDONR201 was purchased from Invitrogen, as part of the Gateway® technology.

[0517] The entry clone comprising SEQ ID NO: 1 or SEQ ID NO: 324 or SEQ ID NO: 447 was then used in an LR reaction with a destination vector used for Oryza sativa transformation. This vector contained as functional elements within the T-DNA borders: a plant selectable marker; a screenable marker expression cassette; and a Gateway cassette intended for LR in vivo recombination with the nucleic acid sequence of interest already cloned in the entry clone. A rice GOS2 promoter (SEQ ID NO: 321 or SEQ ID NO: 443 or SEQ ID NO: 552) for constitutive expression was located upstream of this Gateway cassette.

[0518] After the LR recombination step, the resulting expression vector pGOS2::WIL (FIG. 2) or pGOS2::SAWADEE-like (FIG. 5) or pGOS2::POZ-like (FIG. 11) was transformed into Agrobacterium strain LBA4044 according to methods well known in the art.

### Example 7

### Functional Assay for the SAWADEE-LIKE Polypeptide

[0519] SAWADEE-like polypeptides may have DNA-binding activity in view of the presence of the homeodomain.

[0520] Functional Assay for the POZ-Like Polypeptide

[0521] Geyer et al. (Mol Cell. 12:783-90, 2003) and Gingerich et al. (J Biol Chem. 280:18810-21, 2005) describe two different approaches for determining protein-protein interactions between POZ-like proteins and their interacting partners.

### Example 8

### Plant Transformation

[0522] Rice Transformation

[0523] The Agrobacterium containing the expression vector was used to transform Oryza sativa plants. Mature dry seeds of the rice japonica cultivar Nipponbare were dehusked. Sterilization was carried out by incubating for one minute in 70% ethanol, followed by 30 minutes in 0.2% HgCl2, followed by a 6 times 15 minutes wash with sterile distilled water. The sterile seeds were then germinated on a medium containing 2,4-D (callus induction medium). After incubation in the dark for four weeks, embryogenic, scutellum-derived calli were excised and propagated on the same medium. After two weeks, the calli were multiplied or propagated by subculture on the same medium for another 2 weeks. Embryogenic callus pieces were sub-cultured on fresh medium 3 days before co-cultivation (to boost cell division activity).

[0524] Agrobacterium strain LBA4404 containing the expression vector was used for co-cultivation. Agrobacterium was inoculated on AB medium with the appropriate antibiotics and cultured for 3 days at 28° C. The bacteria were then collected and suspended in liquid co-cultivation medium to a density (OD600) of about 1. The suspension was then transferred to a Petri dish and the calli immersed in the suspension for 15 minutes. The callus tissues were then blotted dry on a filter paper and transferred to solidified, co-cultivation medium and incubated for 3 days in the dark at 25° C. Co-cultivated calli were grown on 2,4-D-containing medium for 4 weeks in the dark at 28° C. in the presence of a selection agent. During this period, rapidly growing resistant callus islands developed. After transfer of this material to a regeneration medium and incubation in the light, the embryogenic potential was released and shoots developed in the next four to five weeks. Shoots were excised from the calli and incubated for 2 to 3 weeks on an auxin-containing medium from which they were transferred to soil. Hardened shoots were grown under high humidity and short days in a greenhouse.

[0525] Approximately 35 independent T0 rice transformants were generated for one construct. The primary transformants were transferred from a tissue culture chamber to a greenhouse. After a quantitative PCR analysis to verify copy number of the T-DNA insert, only single copy transgenic plants that exhibit tolerance to the selection agent were kept for harvest of T1 seed. Seeds were then harvested three to five months after transplanting. The method yielded single locus transformants at a rate of over 50% (Aldemita and Hodges1996, Chan et al. 1993, Hiei et al. 1994).

### Example 9

### Transformation of Other Crops

[0526] Corn Transformation

[0527] Transformation of maize (Zea mays) is performed with a modification of the method described by Ishida et al. (1996) Nature Biotech 14(6): 745-50. Transformation is genotype-dependent in corn and only specific genotypes are amenable to transformation and regeneration. The inbred line A188 (University of Minnesota) or hybrids with A188 as a parent are good sources of donor material for transformation, but other genotypes can be used successfully as well. Ears are harvested from corn plant approximately 11 days after pollination (DAP) when the length of the immature embryo is about 1 to 1.2 mm. Immature embryos are cocultivated with Agrobacterium tumefaciens containing the expression vector, and transgenic plants are recovered through organogenesis. Excised embryos are grown on callus induction medium, then maize regeneration medium, containing the selection agent (for example imidazolinone but various selection markers can be used). The Petri plates are incubated in the light at 25° C. for 2-3 weeks, or until shoots develop. The green shoots are transferred from each embryo to maize rooting medium and incubated at 25° C. for 2-3 weeks, until roots develop. The rooted shoots are transplanted to soil in the greenhouse. T1 seeds are produced from plants that exhibit tolerance to the selection agent and that contain a single copy of the T-DNA insert.

[0528] Wheat Transformation

[0529] Transformation of wheat is performed with the method described by Ishida et al. (1996) Nature Biotech 14(6): 745-50. The cultivar Bobwhite (available from CIMMYT, Mexico) is commonly used in transformation. Immature embryos are co-cultivated with Agrobacterium tumefaciens containing the expression vector, and transgenic plants are recovered through organogenesis. After incubation with Agrobacterium, the embryos are grown in vitro on callus induction medium, then regeneration medium, containing the selection agent (for example imidazolinone but various selection markers can be used). The Petri plates are incubated in the light at 25° C. for 2-3 weeks, or until shoots develop. The green shoots are transferred from each embryo to rooting medium and incubated at 25° C. for 2-3 weeks, until roots develop. The rooted shoots are transplanted to soil in the greenhouse. T1 seeds are produced from plants that exhibit tolerance to the selection agent and that contain a single copy of the T-DNA insert.

[0530] Soybean Transformation

[0531] Soybean is transformed according to a modification of the method described in the Texas A&M patent U.S. Pat. No. 5,164,310. Several commercial soybean varieties are amenable to transformation by this method. The cultivar Jack (available from the Illinois Seed foundation) is commonly used for transformation. Soybean seeds are sterilised for in vitro sowing. The hypocotyl, the radicle and one cotyledon are excised from seven-day old young seedlings. The epicotyl and the remaining cotyledon are further grown to develop axillary nodes. These axillary nodes are excised and incubated with Agrobacterium tumefaciens containing the expression vector. After the cocultivation treatment, the explants are washed and transferred to selection media. Regenerated shoots are excised and placed on a shoot elongation medium. Shoots no longer than 1 cm are placed on rooting medium until roots develop. The rooted shoots are transplanted to soil in the greenhouse. T1 seeds are produced from plants that exhibit tolerance to the selection agent and that contain a single copy of the T-DNA insert.

[0532] Rapeseed/Canola Transformation

[0533] Cotyledonary petioles and hypocotyls of 5-6 day old young seedling are used as explants for tissue culture and transformed according to Babic et al. (1998, Plant Cell Rep 17: 183-188). The commercial cultivar Westar (Agriculture Canada) is the standard variety used for transformation, but other varieties can also be used. Canola seeds are surface-sterilized for in vitro sowing. The cotyledon petiole explants with the cotyledon attached are excised from the in vitro seedlings, and inoculated with Agrobacterium (containing the expression vector) by dipping the cut end of the petiole explant into the bacterial suspension. The explants are then cultured for 2 days on MSBAP-3 medium containing 3 mg/l BAP, 3% sucrose, 0.7% Phytagar at 23° C., 16 hr light. After two days of co-cultivation with Agrobacterium, the petiole explants are transferred to MSBAP-3 medium containing 3 mg/l BAP, cefotaxime, carbenicillin, or timentin (300 mg/l) for 7 days, and then cultured on MSBAP-3 medium with cefotaxime, carbenicillin, or timentin and selection agent until shoot regeneration. When the shoots are 5-10 mm in length, they are cut and transferred to shoot elongation medium (MSBAP-0.5, containing 0.5 mg/l BAP). Shoots of about 2 cm in length are transferred to the rooting medium (MS0) for root induction. The rooted shoots are transplanted to soil in the greenhouse. T1 seeds are produced from plants that exhibit tolerance to the selection agent and that contain a single copy of the T-DNA insert.

[0534] Alfalfa Transformation

[0535] A regenerating clone of alfalfa (Medicago sativa) is transformed using the method of (McKersie et al., 1999 Plant Physiol 119: 839-847). Regeneration and transformation of alfalfa is genotype dependent and therefore a regenerating plant is required. Methods to obtain regenerating plants have been described. For example, these can be selected from the cultivar Rangelander (Agriculture Canada) or any other commercial alfalfa variety as described by Brown DCW and A Atanassov (1985. Plant Cell Tissue Organ Culture 4: 111-112). Alternatively, the RA3 variety (University of Wisconsin) has been selected for use in tissue culture (Walker et al., 1978 Am J Bot 65:654-659). Petiole explants are cocultivated with an overnight culture of Agrobacterium tumefaciens C58C1 pMP90 (McKersie et al., 1999 Plant Physiol 119: 839-847) or LBA4404 containing the expression vector. The explants are cocultivated for 3 d in the dark on SH induction medium containing 288 mg/L Pro, 53 mg/L thioproline, 4.35 g/L K2SO4, and 100 μm acetosyringinone. The explants are washed in half-strength Murashige-Skoog medium (Murashige and Skoog, 1962) and plated on the same SH induction medium without acetosyringinone but with a suitable selection agent and suitable antibiotic to inhibit Agrobacterium growth. After several weeks, somatic embryos are transferred to BOi2Y development medium containing no growth regulators, no antibiotics, and 50 g/L sucrose. Somatic embryos are subsequently germinated on half-strength Murashige-Skoog medium. Rooted seedlings were transplanted into pots and grown in a greenhouse. T1 seeds are produced from plants that exhibit tolerance to the selection agent and that contain a single copy of the T-DNA insert.

[0536] Cotton Transformation

[0537] Cotton is transformed using Agrobacterium tumefaciens according to the method described in U.S. Pat. No. 5,159,135. Cotton seeds are surface sterilised in 3% sodium hypochlorite solution during 20 minutes and washed in distilled water with 500 μg/ml cefotaxime. The seeds are then transferred to SH-medium with 50 μg/ml benomyl for germination. Hypocotyls of 4 to 6 days old seedlings are removed, cut into 0.5 cm pieces and are placed on 0.8% agar. An Agrobacterium suspension (approx. 108 cells per ml, diluted from an overnight culture transformed with the gene of interest and suitable selection markers) is used for inoculation of the hypocotyl explants. After 3 days at room temperature and lighting, the tissues are transferred to a solid medium (1.6 g/l Gelrite) with Murashige and Skoog salts with B5 vitamins (Gamborg et al., Exp. Cell Res. 50:151-158 (1968)), 0.1 mg/l 2,4-D, 0.1 mg/l 6-furfurylaminopurine and 750 μg/ml MgCL2, and with 50 to 100 μg/ml cefotaxime and 400-500 μg/ml carbenicillin to kill residual bacteria. Individual cell lines are isolated after two to three months (with subcultures every four to six weeks) and are further cultivated on selective medium for tissue amplification (30° C., 16 hr photoperiod). Transformed tissues are subsequently further cultivated on non-selective medium during 2 to 3 months to give rise to somatic embryos. Healthy looking embryos of at least 4 mm length are transferred to tubes with SH medium in fine vermiculite, supplemented with 0.1 mg/l indole acetic acid, 6 furfurylaminopurine and gibberellic acid. The embryos are cultivated at 30° C. with a photoperiod of 16 hrs, and plantlets at the 2 to 3 leaf stage are transferred to pots with vermiculite and nutrients. The plants are hardened and subsequently moved to the greenhouse for further cultivation.

[0538] Sugarbeet Transformation

[0539] Seeds of sugarbeet (Beta vulgaris L.) are sterilized in 70% ethanol for one minute followed by 20 min. shaking in 20% Hypochlorite bleach e.g. Clorox® regular bleach (commercially available from Clorox, 1221 Broadway, Oakland, Calif. 94612, USA). Seeds are rinsed with sterile water and air dried followed by plating onto germinating medium (Murashige and Skoog (MS) based medium (Murashige, T., and Skoog, 1962. Physiol. Plant, vol. 15, 473-497) including B5 vitamins (Gamborg et al.; Exp. Cell Res., vol. 50, 151-8.) supplemented with 10 g/l sucrose and 0.8% agar). Hypocotyl tissue is used essentially for the initiation of shoot cultures according to Hussey and Hepher (Hussey, G., and Hepher, A., 1978. Annals of Botany, 42, 477-9) and are maintained on MS based medium supplemented with 30 g/l sucrose plus 0.25 mg/l benzylamino purine and 0.75% agar, pH 5.8 at 23-25° C. with a 16-hour photoperiod. Agrobacterium tumefaciens strain carrying a binary plasmid harbouring a selectable marker gene, for example nptII, is used in transformation experiments. One day before transformation, a liquid LB culture including antibiotics is grown on a shaker (28° C., 150 rpm) until an optical density (O.D.) at 600 nm of ˜1 is reached. Overnight-grown bacterial cultures are centrifuged and resuspended in inoculation medium (O.D. ˜1) including Acetosyringone, pH 5.5. Shoot base tissue is cut into slices (1.0 cm×1.0 cm×2.0 mm approximately). Tissue is immersed for 30 s in liquid bacterial inoculation medium. Excess liquid is removed by filter paper blotting. Co-cultivation occurred for 24-72 hours on MS based medium incl. 30 g/l sucrose followed by a non-selective period including MS based medium, 30 g/l sucrose with 1 mg/l BAP to induce shoot development and cefotaxim for eliminating the Agrobacterium. After 3-10 days explants are transferred to similar selective medium harbouring for example kanamycin or G418 (50-100 mg/l genotype dependent). Tissues are transferred to fresh medium every 2-3 weeks to maintain selection pressure. The very rapid initiation of shoots (after 3-4 days) indicates regeneration of existing meristems rather than organogenesis of newly developed transgenic meristems. Small shoots are transferred after several rounds of subculture to root induction medium containing 5 mg/l NAA and kanamycin or G418. Additional steps are taken to reduce the potential of generating transformed plants that are chimeric (partially transgenic). Tissue samples from regenerated shoots are used for DNA analysis. Other transformation methods for sugarbeet are known in the art, for example those by Linsey & Gallois (Linsey, K., and Gallois, P., 1990. Journal of Experimental Botany; vol. 41, No. 226; 529-36) or the methods published in the international application published as WO9623891A.

[0540] Sugarcane Transformation

[0541] Spindles are isolated from 6-month-old field grown sugarcane plants (Arencibia et al., 1998. Transgenic Research, vol. 7, 213-22; Enriquez-Obregon et al., 1998. Planta, vol. 206, 20-27). Material is sterilized by immersion in a 20% Hypochlorite bleach e.g. Clorox® regular bleach (commercially available from Clorox, 1221 Broadway, Oakland, Calif. 94612, USA) for 20 minutes. Transverse sections around 0.5 cm are placed on the medium in the top-up direction. Plant material is cultivated for 4 weeks on MS (Murashige, T., and Skoog, 1962. Physiol. Plant, vol. 15, 473-497) based medium incl. B5 vitamins (Gamborg, O., et al., 1968. Exp. Cell Res., vol. 50, 151-8) supplemented with 20 g/l sucrose, 500 mg/l casein hydrolysate, 0.8% agar and 5 mg/l 2,4-D at 23° C. in the dark. Cultures are transferred after 4 weeks onto identical fresh medium. Agrobacterium tumefaciens strain carrying a binary plasmid harbouring a selectable marker gene, for example hpt, is used in transformation experiments. One day before transformation, a liquid LB culture including antibiotics is grown on a shaker (28° C., 150 rpm) until an optical density (O.D.) at 600 nm of ˜0.6 is reached. Overnight-grown bacterial cultures are centrifuged and resuspended in MS based inoculation medium (O.D. ˜0.4) including acetosyringone, pH 5.5. Sugarcane embryogenic callus pieces (2-4 mm) are isolated based on morphological characteristics as compact structure and yellow colour and dried for 20 min. in the flow hood followed by immersion in a liquid bacterial inoculation medium for 10-20 minutes. Excess liquid is removed by filter paper blotting. Co-cultivation occurred for 3-5 days in the dark on filter paper which is placed on top of MS based medium incl. B5 vitamins containing 1 mg/l 2,4-D. After co-cultivation calli are washed with sterile water followed by a non-selective cultivation period on similar medium containing 500 mg/l cefotaxime for eliminating remaining Agrobacterium cells. After 3-10 days explants are transferred to MS based selective medium incl. B5 vitamins containing 1 mg/l 2,4-D for another 3 weeks harbouring 25 mg/l of hygromycin (genotype dependent). All treatments are made at 23° C. under dark conditions. Resistant calli are further cultivated on medium lacking 2,4-D including 1 mg/l BA and 25 mg/l hygromycin under 16 h light photoperiod resulting in the development of shoot structures. Shoots are isolated and cultivated on selective rooting medium (MS based including, 20 g/l sucrose, 20 mg/l hygromycin and 500 mg/l cefotaxime). Tissue samples from regenerated shoots are used for DNA analysis. Other transformation methods for sugarcane are known in the art, for example from the international application published as WO2010/151634A and the granted European patent EP1831378.

### Example 10

### Phenotypic Evaluation Procedure

[0542] 10.1 Evaluation Setup

[0543] Approximately 35 to about 90 independent T0 rice transformants were generated. The primary transformants were transferred from a tissue culture chamber to a greenhouse for growing and harvest of T1 seed. Events, of which the T1 events segregated 3:1 for presence/absence of the transgene, were retained. For each of these events, approximately 9 T1 seedlings containing the transgene (hetero- and homo-zygotes) and approximately 9 T1 seedlings lacking the transgene (nullizygotes) were selected by monitoring visual marker expression. The transgenic plants and the corresponding nullizygotes were grown side-by-side at random positions. Greenhouse conditions were of shorts days (12 hours light), 28° C. in the light and 22° C. in the dark, and a relative humidity of 70%. Plants grown under non-stress conditions are watered at regular intervals to ensure that water and nutrients are not limiting and to satisfy plant needs to complete growth and development, unless they were used in a stress screen.

[0544] From the stage of sowing until the stage of maturity the plants were passed several times through a digital imaging cabinet. At each time point digital images (2048×1536 pixels, 16 million colours) were taken of each plant from at least 6 different angles.

[0545] T1 events can be further evaluated in the T2 generation following the same evaluation procedure as for the T1 generation, e.g. with less events and/or with more individuals per event.

[0546] Drought Screen

[0547] Plants from T1 seeds or T2 seeds are grown in potting soil under normal conditions until they approached the heading stage. They are then transferred to a “dry” section where irrigation is withheld. Soil moisture or humidity probes are inserted in randomly chosen pots to monitor the soil water content (SWC). When SWC goes below certain thresholds, the plants are automatically re-watered continuously until a normal level is reached again. The plants are then re-transferred again to normal conditions. The rest of the cultivation (plant maturation, seed harvest) is the same as for plants not grown under abiotic stress conditions. Growth and yield parameters are recorded as detailed for growth under normal conditions.

[0548] Nitrogen Use Efficiency Screen

[0549] Rice plants from T1 seeds or from T2 seeds were grown in potting soil under normal conditions except for the nutrient solution. The pots were watered from transplantation to maturation with a specific nutrient solution containing reduced nitrogen (N) content, usually between 7 to 8 times less. The rest of the cultivation (plant maturation, seed harvest) was the same as for plants not grown under abiotic stress. Growth and yield parameters were recorded as detailed for growth under normal conditions.

[0550] Salt Stress Screen

[0551] Plants are grown on a substrate made of coco fibers and particles of baked clay argex (3 to 1 ratio). A normal nutrient solution is used during the first two weeks after transplanting the plantlets in the greenhouse. After the first two weeks, 25 mM of salt (NaCl) is added to the nutrient solution, until the plants are harvested. Seed-related parameters are then measured. Growth and yield parameters are recorded as detailed for growth under normal conditions.

[0552] 10.2 Statistical Analysis: F Test

[0553] A two factor ANOVA (analysis of variants) was used as a statistical model for the overall evaluation of plant phenotypic characteristics. An F test was carried out on all the parameters measured of all the plants of all the events transformed with the gene of the present invention. The F test was carried out to check for an effect of the gene over all the transformation events and to verify for an overall effect of the gene, also known as a global gene effect. The threshold for significance for a true global gene effect was set at a 5% probability level for the F test. A significant F test value points to a gene effect, meaning that it is not only the mere presence or position of the gene that is causing the differences in phenotype.

[0554] When two experiments with overlapping events are carried out, a combined analysis is performed. This is useful to check consistency of the effects over the two experiments, and if this is the case, to accumulate evidence from both experiments in order to increase confidence in the conclusion. The method uses a mixed-model approach that takes into account the multilevel structure of the data (i.e. experiment-event-segregants). P values are obtained by comparing likelihood ratio test to chi square distributions.

[0555] 10.3 Parameters Measured

[0556] From the stage of sowing until the stage of maturity the plants were passed several times through a digital imaging cabinet. At each time point digital images (2048×1536 pixels, 16 million colours) were taken of each plant from at least 6 different angles as described in WO2010/031780. These measurements were used to determine different parameters.

[0557] Biomass-Related Parameter Measurement

[0558] The plant aboveground area (or leafy biomass) was determined by counting the total number of pixels on the digital images from aboveground plant parts discriminated from the background. This value was averaged for the pictures taken on the same time point from the different angles and was converted to a physical surface value expressed in square mm by calibration. Experiments show that the aboveground plant area measured this way correlates with the biomass of plant parts above ground. The above ground area is the area measured at the time point at which the plant had reached its maximal leafy biomass. The early vigour is the plant (seedling) aboveground area three weeks post-germination.

[0559] Increase in root biomass is expressed as an increase in total root biomass (measured as maximum biomass of roots observed during the lifespan of a plant); or as an increase in the root/shoot index, measured as the ratio between root mass and shoot mass in the period of active growth of root and shoot. In other words, the root/shoot index is defined as the ratio of the rapidity of root growth to the rapidity of shoot growth in the period of active growth of root and shoot. Root biomass can be determined using a method as described in WO 2006/029987.

[0560] Parameters Related to Development Time

[0561] The early vigour is the plant aboveground area three weeks post-germination. Early vigour was determined by counting the total number of pixels from aboveground plant parts discriminated from the background. This value was averaged for the pictures taken on the same time point from different angles and was converted to a physical surface value expressed in square mm by calibration.

[0562] AreaEmer is an indication of quick early development when this value is decreased compared to control plants. It is the ratio (expressed in %) between the time a plant needs to make 30% of the final biomass and the time needs to make 90% of its final biomass.

[0563] The “time to flower” or “flowering time” of the plant can be determined using the method as described in WO 2007/093444.

[0564] Seed-Related Parameter Measurements

[0565] The mature primary panicles were harvested, counted, bagged, barcode-labelled and then dried for three days in an oven at 37° C. The panicles were then threshed and all the seeds were collected and counted. The seeds are usually covered by a dry outer covering, the husk. The filled husks (herein also named filled florets) were separated from the empty ones using an air-blowing device. The empty husks were discarded and the remaining fraction was counted again. The filled husks were weighed on an analytical balance.

[0566] The total number of seeds was determined by counting the number of filled husks that remained after the separation step. The total seed weight was measured by weighing all filled husks harvested from a plant.

[0567] The total number of florets per plant was determined by counting the number of husks (whether filled or not) harvested from a plant.

[0568] Thousand Kernel Weight (TKW) is extrapolated from the number of seeds counted and their total weight.

[0569] The Harvest Index (HI) in the present invention is defined as the ratio between the total seed weight and the above ground area (mm²), multiplied by a factor 106.

[0570] The total number of flowers per panicle as defined in the present invention is the ratio between the total number of flowers and the number of mature primary panicles.

[0571] The “seed fill rate” or “seed filling rate” as defined in the present invention is the proportion (expressed as a %) of the number of filled florets (i.e. florets containing seeds) over the total number of florets. In other words, the seed filling rate is the percentage of florets that are filled with seed.

### Example 11

### Results of the Phenotypic Evaluation of the Transgenic Plants

[0572] WIL Polypeptides

[0573] The results of the evaluation of transgenic rice plants in the T1 generation and expressing a nucleic acid encoding the WIL polypeptide of SEQ ID NO: 2 under stress conditions are presented below in Table D1. When grown under nitrogen deficiency stress conditions, an increase of at least 5% was observed for total seed weight, fill rate and harvest index (Table D1).

TABLE D1
Data summary for transgenic rice plants; for each
parameter, the overall percent increase is shown,
for each parameter the p-value is <0.05.

| Parameter | Overall increase |
|---|---|
| totalwgseeds | 14.1 |
| fillrate | 13.7 |
| harvestindex | 9.2 |

[0574] SAWADEE-LIKE Polypeptides

[0575] Results of the phenotypic evaluation of the transgenic plants grown under non-stress conditions expressing a SAWADEE-like nucleic acid according to SEQ ID NO: 324 under the control of a GOS2 promoter

| Parameter | % Overall |
|---|---|
| Root Shoot Index | −6.2 |
| Fill rate | 5.0 |
| Number flowers per panicle | 7.4 |
| Area Emergence | 45.0 |

[0576] % overall shown in the table above is for a parameter giving p<0.05 in the F-test of and at least a 5% difference between the transgenic events and corresponding nullizygotes and in the case of TKW at least a 5% difference between the transgenic events and corresponding nullizygotes.

[0577] In addition to the parameters indicated in the table above, some events also showed an increase in aboveground biomass, emergence vigour, early flowering, total weight of seeds, fill rate TKW, greenness before flowering, number of filled seeds, number of flowers per panicle and plant height, compared to corresponding nullizygotes.

[0578] Results of the phenotypic evaluation of the transgenic plants grown under low nitrogen conditions expressing a SAWADEE-like nucleic acid according to SEQ ID NO: 324 under the control of a GOS2 promoter

| Parameter | % Overall |
|---|---|
| Area Max (aboveground biomass) | 7.7 |
| Root Shoot Index | −11.6 |
| Total weight seeds | 15.8 |
| Fill rate | 7.1 |
| Harvest index | 7.0 |
| TKW | 5.5 |
| Number filled seed | 9.3 |
| Flowers per panicle | 10.9 |
| Height Max | 6.1 |
| Gravity Y Max | 8.2 |
| Area Emergence | 10.3 |

[0579] % overall shown in the table above is for a parameter giving p<0.05 in the F-test of and at least a 5% difference between the transgenic events and corresponding nullizygotes and in the case of TKW at least a 5% difference between the transgenic events and corresponding nullizygotes.

[0580] Gravity Y Max is a robust indication of the height of the plant (gravity centre of the leafy biomass) avoiding the influence of a single erect leaf.

[0581] In addition to the parameters indicated in the table above, some events also showed an increase in aboveground biomass, emergence vigour and early flowering compared to corresponding nullizygotes.

[0582] POZ-Like Polypeptide

[0583] Transgenic rice plants expressing the POZ-like nucleic acid of SEQ ID NO: 447 under control of the rice GOS2 promoter and grown under conditions of nitrogen deficiency showed increased yield as presented in Table D2.

TABLE D2
Data summary for transgenic rice plants; for each parameter,
the overall percent increase is shown for the confirmation
(T2 generation), for each parameter the p-value is <0.05
or p < 0.1 where it is marked *.

| Parameter | Overall |
|---|---|
| AreaMax | 6.6 |
| firstpan | 20.4 |
| RootMax | 2.7* |
| nrtotalseed | 7.3* |

We claim:

1. A method for enhancing a yield-related trait in a plant relative to a control plant, comprising:
(a) modulating expression in a plant of a nucleic acid encoding a SAWADEE-like polypeptide, wherein said SAWADEE-like polypeptide comprises:
(i) a homeodomain;
(ii) a SAWADEE domain; and
(iii) a nuclear localisation signal (NLS);
or
(b) modulating expression in a plant of a nucleic acid encoding a WI12-like (WIL) polypeptide, wherein said WIL polypeptide comprises one or more of the following motifs:
(i) Motif 1 of SEQ ID NO: 317;
(ii) Motif 2 of SEQ ID NO: 318; and
(iii) Motif 3 of SEQ ID NO: 319.

2. The method of claim 1, wherein:
(a) said homeodomain comprises the amino acid sequence of SEQ ID NO: 438 or an amino acid sequence having at least 60% sequence identity to the amino acid sequence of SEQ ID NO: 438;
(b) said SAWADEE domain comprises:
(i) Motif 4 of SEQ ID NO: 439, or a motif having at least 60% sequence identity to Motif 4 of SEQ ID NO: 439;
(ii) Motif 5 of SEQ ID NO: 440, or a motif having at least 60% sequence identity to Motif 5 of SEQ ID NO: 440; and
(iii) Motif 6 of SEQ ID NO: 441, or a motif having at least 60% sequence identity to Motif 6 of SEQ ID NO: 441,
wherein said SAWADEE domain comprises the conserved cysteine and histidine residues indicated in FIG. 3;
or
(b) said WIL polypeptide comprises an Interpro accession IPR009798 WI12 domain, corresponding to PFAM accession number PF07107 WI12 domain.

3. The method of claim 1, wherein said modulated expression is effected by introducing and expressing in a plant a nucleic acid encoding said SAWADEE-like polypeptide or said WIL polypeptide.

4. The method of claim 1, wherein said enhanced yield-related trait comprises increased yield, increased biomass, and/or increased seed yield relative to a control plant.

5. The method of claim 1, wherein said enhanced yield-related trait is obtained under non-stress conditions.

6. The method of claim 1, wherein said enhanced yield-related trait is obtained under conditions of drought stress, salt stress or nitrogen deficiency.

7. The method of claim 1, wherein:
(a) said nucleic acid encoding a SAWADEE-like polypeptide is of plant origin, from a dicotyledonous plant, from a plant of the family Brassicaceae, from a plant of the Populus genus, or from a Populus trichocarpa plant; or
(b) said nucleic acid encoding a WIL polypeptide is of plant origin, from a monocotyledonous plant, from a plant of the family Poaceae, from a plant of the genus Oryza, or from a Oryza sativa plant.

8. The method of claim 1, wherein:
(a) said nucleic acid encoding a SAWADEE-like polypeptide encodes any one of the polypeptides listed in Table A2 or is a portion of such a nucleic acid, or a nucleic acid capable of hybridizing with such a nucleic acid, and/or wherein said nucleic acid sequence encodes an orthologue or paralogue of any of the polypeptides given in Table A2; or
(b) wherein said nucleic acid encoding a WIL polypeptide encodes any one of the polypeptides listed in Table A1 or is a portion of such a nucleic acid, or a nucleic acid capable of hybridizing with such a nucleic acid, and/or wherein said nucleic acid sequence encodes an orthologue or paralogue of any of the polypeptides given in Table A1.

9. The method of claim 1, wherein:
(a) said nucleic acid encodes a SAWADEE-like polypeptide comprising the amino acid sequence of SEQ ID NO: 325 or an amino acid sequence having at least 80% sequence identity to the amino acid sequence of SEQ ID NO: 325; or
(b) said nucleic acid encodes a WIL polypeptide comprising the amino acid sequence of SEQ ID NO: 2 or an amino acid sequence having at least 80% sequence identity to the amino acid sequence of SEQ ID NO: 2.

10. The method of claim 3, wherein said nucleic acid is operably linked to a constitutive promoter, a medium strength constitutive promoter, a plant promoter, a GOS2 promoter, or a GOS2 promoter from rice.

11. A plant obtained by the method of claim 1, or a plant cell, plant part, seed, or progeny thereof, wherein said plant, or said plant cell, plant part, seed, or progeny thereof, comprises a recombinant nucleic acid encoding said SAWADEE-like polypeptide or said WIL polypeptide.

12. A construct comprising:
(a) a nucleic acid encoding a SAWADEE-like polypeptide or a WIL polypeptide as defined in claim 1;
(b) one or more heterologous control sequences capable of driving expression of the nucleic acid of (a); and optionally
(c) a transcription termination sequence.

13. The construct of claim 12, wherein one of said control sequences is a constitutive promoter, a medium strength constitutive promoter, a plant promoter, a GOS2 promoter, or a GOS2 promoter from rice.

14. A method for making a plant having increased yield, increased biomass, and/or increased seed yield relative to a control plant, comprising transforming the construct of claim 12 into a plant, plant cell or plant part.

15. A plant, plant part or plant cell comprising the construct of claim 12.

16. A method for the production of a transgenic plant having increased yield, increased biomass, and/or increased seed yield relative to a control plant, comprising:
(a) introducing and expressing in a plant cell or plant a nucleic acid encoding a SAWADEE-like polypeptide or a WIL polypeptide as defined in claim 1;
(b) cultivating said plant cell or plant under conditions promoting plant growth and development.

17. A transgenic plant having increased yield, increased biomass, and/or increased seed yield relative to a control plant, resulting from modulated expression of a nucleic acid encoding a SAWADEE-like polypeptide or a WIL polypeptide as defined in claim 1, or a transgenic plant cell derived from said transgenic plant.

18. The transgenic plant of claim 17, or a transgenic plant cell derived therefrom, wherein said plant is a crop plant, a monocotyledonous plant, or a cereal, or wherein said plant is beet, sugarbeet, alfalfa, sugarcane, rice, maize, wheat, barley, millet, rye, triticale, sorghum, emmer, spelt, secale, einkorn, teff, milo, or oats.

19. Harvestable parts of the transgenic plant of claim 17, wherein said harvestable parts comprise a recombinant nucleic acid encoding said SAWADEE-like polypeptide or said WIL polypeptide, and wherein said harvestable parts are preferably shoot biomass and/or seeds.

20. Products derived from the transgenic plant of claim 17 and/or from harvestable parts of said plant, wherein said products comprise a recombinant nucleic acid encoding said SAWADEE-like polypeptide or said WIL polypeptide.

The application's sequence listing, which the Patent Office published only in electronic form, follows.

SEQUENCE LISTING (556 sequences)

SEQ ID NO: 1 - DNA, 855 bp, Oryza sativa
cagtcacgacgttgtaaaacgacgaccagtcttaagctcgggccccaaataatgattttattttgactgatagtgacctgtttcgttgcacaaattgatgagcaatgcttttttataatgccaactttgtacaaaaaagcaggcttaaacaatggccatggagttggaagcggaggaggaggcgatgatgacggcgagggagaacgagaggctggtggagtcgctgtacgcggcggtggcggcgggggacggggcggcggcgtcggccgtgctggcgggcgacgtggactggtggttccacgggccgaggcggtgcgagcacatgcggcggcgcctgaccggggaggccgaggctgcgtcggcgtcgtccttcgtgttcgtgccgcggcaggtggcggcggtggggcgcggcggcgggtgggtggtggcggaagggtgggaggggccacgcgcgtactgggtccacgcctgggccgtcgagggcggccgcatcacccgcctccgcgagtacttcaacacctccgtcaccgtccgggacgtcggcggcggcggccactgccggccgcagctcgacggaggaggagttcgccggcgcgccgccgtgtgctggcagagccaacgtgggcgcggcggcggcgacgacgacgacgacaggtcgctgcctggcctcgtgctcgccatctacacgtgacccagctttcttgtacaaagttggcattataagaaagcattgcttatcaatttgttgcaacgaacaggtcactatcagtcaaaataaaatcattatttgccatccagctgatatcccctatagtgagtcgtattacatggtcatagctgtttcctggcagctct

SEQ ID NO: 2 - protein, 179 aa, Oryza sativa
MAMELEAEEEAMMTARENERLVESLYAAVAAGDGAAASAVLAGDVDWWFHGPRRCEHMRRRLTGEAEAASASSFVFVPRQVAAVGRGGGWVVAEGWEGPRAYWVHAWAVEGGRITRLREYFNTSVTVRDVGGGGHCRPQLDGGGVRRRAAVCWQSQRGRGGGDDDDDRSLPGLVLAIYT

SEQ ID NO: 3 - DNA, 682 bp, Adonis aestivalis
aagagcaacaacagcttgtggtagagaagctttatgaagcgttgagaggcggagacgtagataccgtgcaaaggttactggctgccgacatcgaatggtggtatcacggcccgccttgccatcagcaacatctcatgcaactgctgaccggcggtgctgatcttcccaaaaccaaaagcaaattgtctttcgctcctagccgtatcactgctatcggtttgaacacggtgttagctgaaggctgcgaaaagaatccggcggtgtcttgggtgcatgcttggaccgttaacgatgatggtgtaatcactcagatcagagagtatattaacacacagctcacggttgcacgttttgacaagaagaagaagaaactcttatgttcgtcttccaaatcatcttcttccattttttgggaaagtaggctctctggaaagtcggtgcctggtcttgtcttggcaatttaataataattggatatcaaactaagcctattaaggcgtttgagaagatgtagtagtctcaagttgtttgtgttctaaggtttggggggtttgtgttctctggggttggatagtttgtatttgttagtgatgatcaccacgttgaattggtggtcagtttcttttcatgtttatgtttgtagtcttcctgacaattatgaaacattgttctctttcctttt

SEQ ID NO: 4 - protein, 109 aa, Adonis aestivalis
MQLLTGGADLPKTKSKLSFAPSRITAIGLNTVLAEGCEKNPAVSWVHAWTVNDDGVITQIREYINTQLTVARFDKKKKKLLCSSSKSSSSIFWESRLSGKSVPGLVLAI

SEQ ID NO: 5 - DNA, 467 bp, Arabidopsis lyrata
gacgtggttctgaaactgtatgaagccttgagatctcgcgacgttaaatctgtgcaccagatcttaaccccagatctggagtattggttccacggccctccgccgcaccagtttttgatgcgcgtactcaccggaggagtctctccgtcttcttcctcgttcgaattcgtacctctctccgtcgtttcgttcggatctaccgtaatcgcagaaggctgcgacgccgcgacctcgatttcttggatccacgcttggaccgtagcgaatgggataatcacacaggtgagggagtactctaacacttctctcaccgtcacgcggatcggtaacgttgttgctggacgacgctccgctgagattgcgccgtcgcattgcccctccgtgtgggaaagccaattctcgggtcgggcaggtaaatccgtacccggtttggttctggcgatttgaaagaatttggtaaagtaagt

SEQ ID NO: 6 - protein, 109 aa, Arabidopsis lyrata
MRVLTGGVSPSSSSFEFVPLSVVSFGSTVIAEGCDAATSISWIHAWTVANGIITQVREYSNTSLTVTRIGNVVAGRRSAEIAPSHCPSVWESQFSGRAGKSVPGLVLAI

SEQ ID NO: 7 - DNA, 623 bp, Antirrhinum majus
ccaattcactttggtttgttactgctctcattaatcaacaactggcgatatctgagtcaactctggaggaggaatctttattcaacaaaggggtggtgaccgccctgtatgacgccttgaacacccgccacgtggcagctgtccagaagattctagcccccgacctcgagtggtggttccatggtccgccgacacaccagttcttgatgcgcctgctcacaggagaagaacaggactctgaatatttcaaattcgtaccccacagcatctccgccttcggatccaccgttctcgcagagggattcgaccaatcgctgtcgatcgcctgggttcacgcctggaccgtcacggatgggataattacccaggtcagagagtacctgaacacgtcacttactgtcacgcgtgttggaaacgccgaccaatcggatcgtagcattctgccacgtaattgtccctcgctttgggagagcagtcttccgggtcgggtcggaaagtccgtgcccggtttggtcctcgcgctctgatttgggtttttaagggttttgaaatatcgctctataattaatataatagtaattaagaataaagagtgataaggattgtgtgtgtgtgtgtgtgtg

SEQ ID NO: 8 - protein, 106 aa, Antirrhinum majus
MRLLTGEEQDSEYFKFVPHSISAFGSTVLAEGFDQSLSIAWVHAWTVTDGIITQVREYLNTSLTVTRVGNADQSDRSILPRNCPSLWESSLPGRVGKSVPGLVLAL

SEQ ID NO: 9 - DNA, 918 bp, Arabidopsis thaliana
tcaaaatccttcaagaatcgcttcatcttcttcttcttcaacaaatcgagtcctttttctgataactcatttcgatttcagaaactcgccaagaactggatactctggcggaatcagagattaagaaccgagacgtggttctgaaactgtatgaagccctgagatctcgcgacgtcaaatctgtgcaccagatcttaaccccagatctggagtattggttccacggtcctccgccgcaccagtttttgatgcgcgtactcaccggaggtgtctctccgtcttcttcctccttcgaattcgtacctctctccgtcgtttccttcggatctaccgtaatcgcggaaggctgcgacgccgcgacatcgatttcttggatccacgcttggactgtagcgaatgggataatcacacaggtgagggagtactctaacacttctctcaccgtcacacggatcggtaacgttgttgctggacgacgctccgctgagattgcgcctccgtcgcattgttcctccgtgtgggaaagccaattctcgggtcgggctggtaaacccgtacccggtttggttctggcgatttgaaagagtttggtaaagtaagtaacagccacgtcaggagaataactaaataaaggctgcttacgtgtctgtgtgtggttggtttgtttgttgtatgggttaaaaaggattttgttgctgttttaaacgcggtgtgggcttctggggctacggtcgcgtttggctgtcgctagtttttttttttttttaagttgtttgtctgaaaattcgtgtgggtttgtgttttttagtgggagcaagtatggggaaacccaaatcgacttgttgtcccgttgcgtttgatgtaacgtttgcttatgttataattgaaataaaaaagtgcttttgggatcttttgatg

SEQ ID NO: 10 - protein, 110 aa, Arabidopsis thaliana
MRVLTGGVSPSSSSFEFVPLSVVSFGSTVIAEGCDAATSISWIHAWTVANGIITQVREYSNTSLTVTRIGNVVAGRRSAEIAPPSHCSSVWESQFSGRAGKPVPGLVLAI

SEQ ID NO: 11 - DNA, 806 bp, Brassica napus
aggggaataagcttatctacgttgttcgtctcttaattaatccaattttttaatcccgaaaactctttcaagaactggatactctggcggattctgagaccaagaaccgagacgtggttctgaagctgtatgacgccctgagatctcgcgacgtcgactccgttcaccggaccctaaccccggacctcgactactggttccacggccctccgccgcaccagtttttgatgcgcacgctcaccggcgtctctccgccgtttgaattctcgcctctctccgtcgtctccttcggatccaccgtcattgccgagggctgcgacgccgccagctccgtctcctggatccacgcctggaccgtgtcgcatggggtaatcactcaggtgagggagtactcgaacacctcgctcacggttacgcggatcggtagcgtcgtctccgggcgctctgcggagatcagggcgtcgcattgcccctccgtgtgggaaagcaaattctcgggtcgggctggaaaatccgtcccgggtctggttcttgcgatttgaggatttggtaaaggttattgctgcagccacgtcagattaataactaaataaaggctgttgcttacgtgtcggtgtgtggttggtttgttgttttatgggttgaaaggatttgtgcggttgagacgcggtgtgggctaacgcttaaaggtcgcgttttggtcgtcgcttttcttctcttgtttttttttttttttttattattagctttaagttcgtgcctttgtttggggttttagtgcgtacaagcatgaggaaacccatatt

SEQ ID NO: 12 - protein, 104 aa, Brassica napus
MRTLTGVSPPFEFSPLSVVSFGSTVIAEGCDAASSVSWIHAWTVSHGVITQVREYSNTSLTVTRIGSVVSGRSAEIRASHCPSVWESKFSGRAGKSVPGLVLAI

SEQ ID NO: 13 - DNA, 798 bp, Brassica napus
cccacgcgtccggttctcttcctcttattgtcctaatccaaaacccaaactcgcgcaagaactggatactctggcggattcagagacaaagaaccgagacgtggttctgaaactgtatgacgccctgagatctcgagacgtcgactcagtgcaccgcacactaacccccgatctcgactactggtttcacggcccaccgccgcaccagtttttgatgcgcacactcacgggagtctctccgacgtttgagttcgtgcctctctccgtagtctcattcggatccaccgtcatcgccgagggctgcgacgttgctagctccatctcctggatccacgcgtggaccgtcgcgcatgggataattatcactcaggtgagggagtactctaacacttctctcacggttacacgggtcggtgacgttgttgctggacggtctgctgagattgcgccgtcgcattgtccatcagtgtgggaaagtcagttctcgggtcgggctggaaagtccgtaccgggtctggttcttgcgatttaaggatttgttcacgtcagggaataacaatatctaaataaagactgcttacttgttgctttgttgtttatgggttgaaggatttgtgcggttgagacgcggtgtgggggtaacagctaaacgctgcgttttgcctgtcgctagttcttcttttgttggatatttgtgtgttttgtgttttagtgggtcaagcatggggaaactcaacttgacttgtgcggttgcgtcggatggttatgttataattgaaataaaaatgtgcttttggg

SEQ ID NO: 14 - protein, 105 aa, Brassica napus
MRTLTGVSPTFEFVPLSVVSFGSTVIAEGCDVASSISWIHAWTVAHGIIITQVREYSNTSLTVTRVGDVVAGRSAEIAPSHCPSVWESQFSGRAGKSVPGLVLAI

SEQ ID NO: 15 - DNA, 658 bp, Brassica oleracea
tgtatgacgccttgagatctcgagacgtcgattcagttcaccgcacactaacccccgatctcgactactggttttacggcccgccgccgcaccagttttgatgcgcacactcacgggagtctctccgacgtttgagttcgtgcctctctccgtcgtctcattcggatccaccgtcatcgccgagggctgcgacgttgctagctccatctcttggatccacgcgtggaccgtcgcgcatgggataatcactcaggtgagggagtactctaacacttctctcacggttacacgggtcggtgacgttgttgctggacggtctgctgagattgcgccgtcgcattgtccatccgtgtgggaaagccagttctcgggtcgggctggaaagtccgtaccgggtctggttcttgcgatttaaggatttgttcacgtcagggaataataatatataaataaagaccgcttactgttggttaattatttgtggtttggtaacacaaatggaggtgaactatatacttgggtaatgattgaatcgccgtgctttgcttaaagagtatttcgaccgtattccaagcctttgggttacacgaaatctctttgtaggataaaacaatcaaagtctcatttttgttctaggttaagatacaaaaataacaaa

SEQ ID NO: 16 - protein, 104 aa, Brassica oleracea
MRTLTGVSPTFEFVPLSVVSFGSTVIAEGCDVASSISWIHAWTVAHGIITQVREYSNTSLTVTRVGDVVAGRSAEIAPSHCPSVWESQFSGRAGKSVPGLVLAI

SEQ ID NO: 17 - DNA, 844 bp, Brassica oleracea
cccacgcgtccgtctccttcttcatcatctccaaatccctaattctcgtgttagctttcgattcaagaaactcgccaagaactggatactctggcggactcagagaccaagaaccgagacgtggttctgaaactgtatgacgccctgagatctcgagacgtcgaatcggttcaccggatcctcaccccggatctcgactactggttccacggccctccgccgcaccagtttttgatgcgcacgctcaccggcgtctctcctcccttcgaattcgtgcctctctccgtcgtctccttcggatccaccgtcatcgccgagggctgcgacgccgctagctccgtctcttggatccacgcctggaccgtgtcgcatgggataatcactcaggtgagggagtactcgaacacttctctcaccgtcacgcggatcggtggcgtcgtcgccggaaggtctgctgagattgcgcgctcgcattgcccctccgtgtgggaaagcaaattctcgggtcgggctggaaaatccgtaccgggtctggttcttgcgatttgaggagtaaaagtcacgtggattaataactaaataaaggctgcttacgtgtcggtgtgtggttggtttgtcgtatatgtgaggaatttgtgcggttggagacgcggtgtgggctgcgttttggctgtcgctagttcttcatttgttttttctttttaatttgctttataatcgcgcttttgtgttttagtgggtacagcaagcatggggatacccaaattggcttgtgccgttatgtctgatgtaacgtttggttatgttataattggaataaaaatgtgcgtttgggatctaaaat

SEQ ID NO: 18 - protein, 104 aa, Brassica oleracea
MRTLTGVSPPFEFVPLSVVSFGSTVIAEGCDAASSVSWIHAWTVSHGIITQVREYSNTSLTVTRIGGVVAGRSAEIARSHCPSVWESKFSGRAGKSVPGLVLAI

SEQ ID NO: 19 - DNA, 876 bp, Capsicum annuum
cggcagaggtgataatcctctctcttttgtacttatcctaataatctcttctctcctctttttccggaactggctaactctcagaaaactctggaagaaaccagaaacaaaggggtggtgctcgccctatatgaagctttgagctcacgtgacgttgacaaggtccagaaacttctggcctctgatctagagtggtggttccatggtccaccctcccaccaatttttgatgcgaattctcactggcactgccagtttggaccatcaactttttcaattcattcctcaaagcattgaagccttcgggtccactgtccttgttgaaggctgtgaacctggtcgctctattacttgggttcacgcttggactgttactgatggcagcgatgggataattactcaggtcagggagtatttcaacacctctctaaccgtcacccggctcgacaataataataataataatactaatagtccatcctcggatttctcttccatcgccacttcaagcaattgtccctctctttgggaaagcagtgtccccaataagtttgttccaggtcttgtcctggctctctgagtttgggtttgatccgattattgttgatgggctgaaatcgcaggtgttaaatcttgtgtccgggaggatgtaagttttaacggttggtttggggctttttgtttttattttatctgcaattttaatttgcttggagttgtttaattaaaagtagggaaaatggggttttggtggagttgggaaagtaccaccatgaatggaagacccttgtactgcttatgctattttgataaattatgtggtatggcgtgtttggtttgcagtaaaagcacttttttttcgtttgttaaaaaaaaa

SEQ ID NO: 20 - protein, 116 aa, Capsicum annuum
MRILTGTASLDHQLFQFIPQSIEAFGSTVLVEGCEPGRSITWVHAWTVTDGSDGIITQVREYFNTSLTVTRLDNNNNNNTNSPSSDFSSIATSSNCPSLWESSVPNKFVPGLVLAL

SEQ ID NO: 21 - DNA, 966 bp, Coffea canephora
cgtctttcctcagcctcttatatatcgaaaacaaaaaagcctctccttcttcgttcggaactggcaaacactcaaactctggaggaaactcaaaacaaagggctggtgctcgccctgtatgaagccttgagtgcacgtgacgtggacaaggtccagcggctcgtagctcccgacctggagtggtggttccatggtccgccttcccaccagtttctgatgcgcctcctcaccggcaatactgacaaagactccttcaatttcgtcccacaatcagtcgccgcctttggatccaccgtcctcgtagaagggtgcgatcaggcccgcaacatcacctgggttcacgcctggaccgtcactgatgggataattacccaagtccgcgagtacttcaacacttccctgacggtgacccgattcggggccgcagataatccctcctcctcgaattttgcccagattacctctctccattgcccgtccgtttgggagagcagtctcgctagccaagtcgggatatccgtgcccggtctcgtcctggctatttgactaaatttggattgggttgtgatctcctgctgctgcactactaatttattagtagtattatcgtaataattaaataaaaaaaggagtagtacgaggtgcaaccacgcttattgtggtttgagtcactcccatatgggctgaagtggtggcggtaaccggtaaagtcgtgccttacgtctgcgaagatgtaggatcgacggtcgggatcgcttttcacttttcagcgcgtcgtttttagtccctttaaagtgcgtgtttgcttttgttctgttctgttatgtcctgttcaagggcatatattatgtttgagtccatcatgactgggaagggttcctggtatttggtctcggatgacgtcactcctatatgttttgtttgccttttcaataaatgttgtcggatttgtttgcttgataaaaa

SEQ ID NO: 22 - protein, 109 aa, Coffea canephora
MRLLTGNTDKDSFNFVPQSVAAFGSTVLVEGCDQARNITWVHAWTVTDGIITQVREYFNTSLTVTRFGAADNPSSSNFAQITSLHCPSVWESSLASQVGISVPGLVLAI

SEQ ID NO: 23 - DNA, 957 bp, Citrus clementina
ccagaatcaccaaaccaattcctttcctcctccgtttctctgtttttgttgttgccattttttaaggctattccgtccagaactggctaactcccagcagaaaaatccggaagattccgaaaacaagaaccagcgcgtggttcttgctctgtatgatgccttaaaatctccagacgttgaaacggtacacaagatccttgccccggacctagagtggtggttccatggcccgccgacccaccagtttatgatgcaccttcccaccggcagcaccaccgcatcgtcagcatcgcaaagctccttcgtattcgttcctctctcgatcacatcgttcgggcccattgtcctcgccgagggctgtgatcacagccgtcaaatcagctgggtccacgcctggacggtcgctgatgggataattactcaagtcagagaatacttcaacacttcgcttaccgtcacccgcttcggtaaagacttgtctggccaaagtcagaggaagaaatcaccaccctctgatttcccatcaacagcggagattaatccggtgcattgcccctccgtttgggagagcagcgtctccaaccgggacggtaaatctgtcccgggtttggttctcgctctctaagcaaaccaaaaaagggaccgagattgatcctgtgcagccgcgtgtattataatattataccatattaacatataaataaaggctgcacgtgacgcgtgtcgcccccgtgtgggccctcgcttagagatgtgagtgactgaggccctggttgggggagtgctttgggttgttttccgccttatttttgtgtctggccttccggttttgtttgtttgataatgttggtccttccgggtccgatcatgatgtgtgaacccgacctccgtgggtggatcccgcctgtgtttaagtcaattggtgcctggatttacgcaaaaaattgggttgttttt

SEQ ID NO: 24 - protein, 125 aa, Citrus clementina
MMHLPTGSTTASSASQSSFVFVPLSITSFGPIVLAEGCDHSRQISWVHAWTVADGIITQVREYFNTSLTVTRFGKDLSGQSQRKKSPPSDFPSTAEINPVHCPSVWESSVSNRDGKSVPGLVLAL

SEQ ID NO: 25 - DNA, 819 bp, Cichorium intybus
ggcggggatccacacatttgtcatttggatctccatttctaatcgtctgcatattctctctctaaagtttccacaagacgtcaatttctgaccgaactggctaaccctcaagaagctctggaggattccagcaataagagcgtggtgctccagctctaccatgccctaagctctcgcgacgttgaaaccgtccacaagctcttagcacctgacctcgagtggtggttccatggccctccgtctcaccagtatatgatgcgattgctcactggaaccgacaacgacaacactgactccttcgaattccttcctctttccgttgacgccttcggatctacagtcatcgtcgaaggctgcgatcaggatcgcgaaatctcctggatccacgcctggacggttaattcgtatggcataatcacacaggtacgggagtacttcaacacttccctcaccgtcactcattttgatagtaactcttccaaacccgtccccattacttccctccattgtccctctctgtgggagagtagcctctctaatcgggtcggaaaatcggttccgggtttggtactggctatatagtaaagggccggatcccctgtgtccgtttacttgatattaaatacttatcgtgtgcttgaataaaactacaagtcaaagtcaaatttgagagcgtgactattctatgggttgaactaacgtggtatcttgcgtctgcgaggatgtaaacgtgcggttgagattcgtggatactgtttggttacagcttctaatttcgtctgtttggttattagtttccgtttgtgtggtttgcgtttg

SEQ ID NO: 26 - protein, 109 aa, Cichorium intybus
MMRLLTGTDNDNTDSFEFLPLSVDAFGSTVIVEGCDQDREISWIHAWTVNSYGIITQVREYFNTSLTVTHFDSNSSKPVPITSLHCPSLWESSLSNRVGKSVPGLVLAI

SEQ ID NO: 27 - DNA, 1011 bp, Curcuma longa
gattttaagcaagaacagagacatcttctattcgatatataagacactgatgaacacacaaaggatgacatgaatccttccgtcttcatcttaattaaaacttaattaatagaagcaaaccacccactaagcttaattatcagcccattaattgatatatatcgctaattaatatgtcgtgattaggattaattgcgtctaaatcgcgaggaccagtccaggaaaggacttgtcgcggcggctctgccagacgggcagacagtgagtcggtccaggcgaaaccgacggcttggtggttgagtcagcggcgaagcgggtgacggtgacggaggtgttgaagtactcccggacctgggtgattatcccatccggggagacggtccaggcgtgaacccaggaggcggcgccggggccggtgccctcggcgacgacggtggagccgaaagtggcgactcggtcggggacgaatcggaactcggcagcggcttcgtcgtcagcgccggtgagcatgcgcatcatgtgctggtgctccggagggccatggaaccaccactcgacctcgtgccgaattcggcacgaggaattcctccaataaatagatccctccatcatcaccatgtcgacctgcggcgattgcagttgcactgacaagtcccagtgcgtgaagaagggaaccagctatacggttgatatcgtcgtcgagactgagaagagctacatgaacgaagtggtggacggtgcagcggccggtgaggagaacgagccgtgccagtgcggccctgcctgtgcttgttttgactgccagtggggcagcgtcatatgatggaaccccttccgcgccgcctatggaattagttttatgaagaaataaggacaaaaatgttgtggtttgtgtgtggctttctatgaagcaaagcagtgtgttaattgtgtgctaagaggagattgtggttcccatcagcataatctccctttaggggtaattaattaacctatatatatatatagttt

SEQ ID NO: 28 - protein, 139 aa, Curcuma longa
MVMMEGSIYWRNSSCRIRHEVEWWFHGPPEHQHMMRMLTGADDEAAAEFRFVPDRVATFGSTVVAEGTGPGAASWVHAWTVSPDGIITQVREYFNTSVTVTRFAADSTTKPSVSPGPTHCLPVWQSRRDKSFPGLVLAI

SEQ ID NO: 29 - DNA, 908 bp, Curcuma longa
aagcaagcacacaagcatatcttttattcaatatataacaggatgataaacacagtggatgagcatcaacaggtactgaaggaagagggaaggatgacatgaatcctttacacttcaccttcatcttaattaattacctattaaaactagaataattaaagcaagcaaaccacagacttaactctaggactcgaatgatagtgaccttatcaacccatctagtgatcgatcgatatatttattaagccttcaccttggtgattaagattaatttctggattattaggcttaatgatttggattaactatgtttaaatcgccaggacgagtccaggaaaggacttgcggccgcggctctgccacacgggcaggcagtgagtcggcctgggcgagtccttgggcgagaccgagggcttgggcggcgagtcagcggcgactcgggtgacggtgacggaggtgttgaagtactcccggacctgggtgattatcccatccggggagacggtccaggcgtggacccaggtggtggcggcgccggggccggtgccctcggcgacgaaggtggagccgaaggcggcgactcgttcgggtaagaatcggaacacggcggcggtgtcgtcgtcagcgccggtgagcatgcgcatcatgtgctggtgctccggcgggccatggaaccaccactcgatgtcgggggcgagcagctgctgcacccggtccgcgtcgcgaccgttcagggcctcatacagcgagagcactcgccacttgttgcggtcctccacgctctctcctgcgctctggttagccagctccggacgagccccctcggctctctcgcgacctccctctctctttccctctcgctgcctgcggaagcggtgctctcggtcggcgaactcggtcactggtgc

SEQ ID NO: 30 - protein, 111 aa, Curcuma longa
MMRMLTGADDDTAAVFRFLPERVAAFGSTFVAEGTGPGAATTWVHAWTVSPDGIITQVREYFNTSVTVTRVAADSPPKPSVSPKDSPRPTHCLPVWQSRGRKSFPGLVLAI

SEQ ID NO: 31 - DNA, 996 bp, Citrus sinensis
ggggaaagccatcaccagttctctctggtaacccttatccagaatcacaaaacaaattcatttcatcttcagtttctctgtttttgttgttgccattttttaaggctattccgtcaagaactggctaactctcagcagaaaaatccggaagattccgaaaacaagaaccagcgcgtggttcttgctctgtatgatgccttaaaatctcgagacgttgaaacggtacacaagatccttgccccggacctagagtggtggttccatggcccgccgacccaccagtttatgatgcaccttctcaccggcagcaccaccgcatcgtcagcatcgcaaagctccttcgtattcgttcctctctcgatcacatcgttcgggcccattgtcctcgccgagggctgtgatcacagccgtcaaatcagctgggtccacgcctggacggtcgctgatgggataattactcaagtcagagaatacttcaacacttcgcttaccgtcacccgcttcggtaaagacttgtctggccaaagtcagaggaagaaatcaccaccctctgatttcccatcaacagcggagattaatccggtgcattgcccctccgtttgggagagcagcgtctccaaccgggacggtaaatctgtcccgggtttggttctcgctctctaagcaaaccaaaaaagggaccgagattgatcctgtgcagccgcgtgtattataatattataccatattaacatataaataaaggctgcacgtgacgcgtgtcgcccccgtgtgggccgtcgcttagagatgtgagtgactgaggccctggttgggggagtgctttgggttgttttcgcctttatttttgtgtctggctttccgggtttgtttgtttgatatgttggtctttccgggtcggatcatgatgtgtgaacccgaactcggttggttgtatccagctgttgtttatgttaattggtgctttgattatcgaataaaaattggttgttttat

SEQ ID NO: 32 - protein, 125 aa, Citrus sinensis
MMHLLTGSTTASSASQSSFVFVPLSITSFGPIVLAEGCDHSRQISWVHAWTVADGIITQVREYFNTSLTVTRFGKDLSGQSQRKKSPPSDFPSTAEINPVHCPSVWESSVSNRDGKSVPGLVLAL

SEQ ID NO: 33 - DNA, 736 bp, Centaurea solstitialis
tcccacattatattgtgaaaacctctagtccatccattatcgactgaactacacgtcatataaaattaattaattaacatgtgtaagtgtaacccacaccaccaaaccccgcccgaggaatgccgccggaatcttttgtccaacttctaccaagcattggccgccggagacgccgccaccatccaccgcctcttagcttccaacatcgaatggtggttccatggtccgcggtcgtgcaaccgtcttatggccttcctcaccggcgccaccaccaccaccacctccagcgaccgcttcttcactttcaacccactctccgtcgtgtccatcggatcgctggtggtggcggaaggctactactcgccggagacccgtgacgtcagctgggtccatgcgttgaccgtcgttgacggggtcataacgcaggtgagggagtatttcaacacttccgttacggtcacccgtttcgccagctcagcaaacgtccacgtggcgtcaaatggtggtgacagttgtcagtgtgtgtggcagagcaagctgactgatagtaaatctatgcctgctcttcttattgctgtttaaggggaactcaagtcaacgattttagcaatcatttgaactttattttcataagatctagagcaaattacggttttagtccctgtgatttgttaaagctatgatttccatccctgtgatttagtaattgtcaatttcatccttacggtttgcatcc

SEQ ID NO: 34 - protein, 167 aa, Centaurea solstitialis
MCKCNPHHQTPPEECRRNLLSNFYQALAAGDAATIHRLLASNIEWWFHGPRSCNRLMAFLTGATTTTTSSDRFFTFNPLSVVSIGSLVVAEGYYSPETRDVSWVHALTVVDGVITQVREYFNTSVTVTRFASSANVHVASNGGDSCQCVWQSKLTDSKSMPALLIAV

SEQ ID NO: 35 - DNA, 667 bp, Centaurea solstitialis
atcacattttctcgtctttgtctgggttagtacgccgaccagcaactgtatggcgataattcaatactggcacgcacgtgcgcaacctgtgaggacgataccaggattcggattggtatgagcgcgctgcgcgcgtacgataggctgcccggaggggaacgcgcatccaacgtggccttatgtatctgagcacccgacctcaggtggtggtgccatgatccccggtctcagcattacatggtgcgattgctcaccggtacggataacggcgcaacagactcctttcagttcggtccgaccacgatcgacgccttcgggtccatggacatcgacgaaggctgcgatcagcgtcgcgacatctccgggatccacgcctggaccgtaagctcggacgggataattacgcaggtcagggagtactttaacacttcccttgccgttactagattcggtggtggtaactgtaactcggctacgaaaaaaccggtttccgttactactacgtcgtccttgcattgcccttacctttgggagagtagactctctggtcgagtcggacgaaaatcggttcctggacttgttctggcgatgtaatgatagaattaaagaaatcacatcttctccgtaaacaataagagtcgaattcggattgtggatttgtgatttg

SEQ ID NO: 36 - protein, 118 aa, Centaurea solstitialis
MVRLLTGTDNGATDSFQFGPTTIDAFGSMDIDEGCDQRRDISGIHAWTVSSDGIITQVREYFNTSLAVTRFGGGNCNSATKKPVSVTTTSSLHCPYLWESRLSGRVGRKSVPGLVLAM

SEQ ID NO: 37 - DNA, 758 bp, Centaurea solstitialis
aaatcccaaaattacctttcacacctctcctataaaaaccaccccaatcccatacacctcttccaccatctccattttccgaccacctccgattccgattccgattccgatcatatcctttttcctaaaagcttaattctctcacagaactggccaaccttcaagaagctctggaggattccggcaacaacgagagcgtggtgctcgcactctaccatgccctgagctctcgcgacgtccaagtcgtccacaagctcctagctcccgacctcgagtggtggttccatggccctccctctcatcagctcatgatgcgattgctcaccggaaccgataacgacacaacagacacctttcagttcgttccgacctcgatcgacgccttcgggtccacggtcatcgtcgaaggctgcgatcaacgccgtgacatctcctggatacacgcctggaccgtaagttcggacgggataattacgcaggtcagggagtactttaacacttcccttgccgtcactcgattcggtggtaactgtaactcggctacgaaaaaaccggtttcggttactacgtcgtcgttgcattgcccttacctttgggagagtagtctctctggtcgcgttggagggaaatcggttcctggccttgttctggcgatatagtaatagaattaaagaaatcacatcttctccgtaaacaataagagtcgaattcgggttgtggatttgtgatttggtaggatgtaagatactaagatctgc

SEQ ID NO: 38 - protein, 116 aa, Centaurea solstitialis
MMRLLTGTDNDTTDTFQFVPTSIDAFGSTVIVEGCDQRRDISWIHAWTVSSDGIITQVREYFNTSLAVTRFGGNCNSATKKPVSVTTSSLHCPYLWESSLSGRVGGKSVPGLVLAI

SEQ ID NO: 39 - DNA, 837 bp, Centaurea solstitialis
cccctcgtggctcgcgctatataaggcttgctttgctttgcatcttttcacatttctatcaccaagtcccaacattatattgtgagaaccttccatccatccattatcgactgaactacacgtcacataaaattaattaattaacatgtgcaagtgtaacccacaccaccaaaccccgcctgaggaatgccaccggaatcttttgtccaacttctaccaagcattggccgccggagacgccgccaccgtccaccgcctcttagctcccaacatcgaatggtggttccatggtccgcggtcatgcaaccgtcttatggccttcctcaccggcgccaccaccacctccggcgaccgctccttcactttcaacccactctccgtcgtgtccatcggttcgctggtggtggccgaaggctactactcaccggagacccgtgacgtcagctgggtccatgcgttgaccgtcgttgacggggttataacgcaggtgagggagtatttcaacacttccgttacggtcacccgttttgccagctcagcaaacgtccacgtggcatcgaatggtggtgacagttgtcagtgtgtgtggcagagcaagctgactgatagtaaatctatgcctgctcttcttattgctgtttaaggggaactcaaagtcaatgattttagcaatcattttaactttattttcataaaatctagagcaaattacgattttagtccctgtgatttgttaaaactatgatttccatccctgtgatttagtaattgtcaatttcatccttacggtttgcattctattgccattttcgtccctagggactaatttttatatct

SEQ ID NO: 40 - protein, 165 aa, Centaurea solstitialis
MCKCNPHHQTPPEECHRNLLSNFYQALAAGDAATVHRLLAPNIEWWFHGPRSCNRLMAFLTGATTTSGDRSFTFNPLSVVSIGSLVVAEGYYSPETRDVSWVHALTVVDGVITQVREYFNTSVTVTRFASSANVHVASNGGDSCQCVWQSKLTDSKSMPALLIAV

SEQ ID NO: 41 - DNA, 808 bp, Centaurea solstitialis
tccctcggacctcatttccgccattaatctccaccttctctctctagaaaaacactttctctctctaaaaaaccactcaaaacagtcgtcaatttctgaaccgaactggctaactctcaagaagctctggaggattccatccctaacaagaccgtagtgctccagctctacgatgccctaagttctcgagacgtcgaaaccgtccacaagctcctcgcccctgacctcgagtggtggttccatggcccgccgtctcaccagtatatgatgcgattgctcaccggaaccgataacagcagcaacaattcaaaagcatcatccacctgcttcaacttcgtgccgcattccgtggacgcattcggatccacggtcctcgtcgaaggcctcgatccggaccgcgagatcttctggatccacgcctggacggttagttcgcagggagtcatcacgcaagtgcgcgaatactttaatactagccttacggttactcgatttggcgttggttcgggttcgtcgaaatcgaaatcggttgcgattacggcgctccattgtccttcggtttgggagagcagtttgtcgaatcgggtcggaaagtcggttccgggtttggtacttgctatataatataactagatttgatcccgtgtaatacacaggataattttaaaaaaaaaaaaaactactcatatagtcaaggggagggatcctctgtggtgtggtttattattatagcgtgtggttgaataaaagaataaagtcaaaggtcaaagttgagaggtgtgattattacctatgggttgaagttgac

SEQ ID NO: 42 - protein, 119 aa, Centaurea solstitialis
MMRLLTGTDNSSNNSKASSTCFNFVPHSVDAFGSTVLVEGLDPDREIFWIHAWTVSSQGVITQVREYFNTSLTVTRFGVGSGSSKSKSVAITALHCPSVWESSLSNRVGKSVPGLVLAI

SEQ ID NO: 43 - DNA, 746 bp, Carthamus tinctorius
gcgggacccccaatccctcggacctcatttccgccattaatcttcttctccacttccttctctctttctctctctaagaaaatcactcacagtcgtcaatttctgaccgaactggctaactctcaagaagctctggaggattccagccataacaagagcgtagtgctccagctctacgatgccctaagctctcgagacgtccaaaccgtccacaagctcctcgcccctgacctcgagtggtggttccatggccctccgtctcaccagtatatgatgcgattgctcaccggaaccgataacaacaacaacgacttcagtttcgtgcctcattccgtcgacgccttcggatctacggtcctcgttgaaggctgcgatccggatcgcgagatcttctggatccacgcctggacggttaattcgaacggcgtaatcactcaggtgcgtgaatacttcaatacttcgctcaccgtaactcgatttggcgttaaaacctcttcttcttcttcttcttccaaatccgtcgccattactgcgctccattgtccttctgtttgggagagcagtctctcgaatcgggtcggaaagtcggttccgggtttggtactggctatataggggagggatcccctgtgtggtcgttgcttcgtgtaggttattatcgtgtggttgaataaaggaataaagtcaaagtcaaagttggaggggtgtgattacctatgggttgaagtcgacgtgttatcctgcgt

SEQ ID NO: 44 - protein, 114 aa, Carthamus tinctorius
MMRLLTGTDNNNNDFSFVPHSVDAFGSTVLVEGCDPDREIFWIHAWTVNSNGVITQVREYFNTSLTVTRFGVKTSSSSSSSKSVAITALHCPSVWESSLSNRVGKSVPGLVLAI

SEQ ID NO: 45 - DNA, 803 bp, Carthamus tinctorius
cgggatccattttccgacaccacctccctccgatcccgattccgatcacatccttttcctaaagcttaaaatctcccacagaactggccaaccttcaagaagctctggaggattccggcaacaacgagagcgtggtgctcgcactctaccatgccctgagctctcgcgacgtccaagtcgtccacaagctcctagctcccgatctcgagtggtggttccatggccctccgtctcaccagtttatgatgcgattgctcaccggaacggataacgacacagccgactcgtttcagttcgtgcctacttcgatcgacgccttcggatccacggtcatcgtcgaaggctgcgatcagcgccgcgacatctcctggatccacgcctggaccgtcagttccgacgggataatcacgcaggtcagggagtacttcaacacctccctcaccgtcactagattcggtaactgtagctctacgaaaaaacctgtttccgttacgtcgtcgttgcattgcccttacctttgggagagtagtctctctaatcgcgtcggaaaatcggttcctggcctggtcctggcaatataaaatagaattgtagaaatcacatcttctccgtaaacaataagagtcagattcggattgtgagttttgtgatttggtaagatgtaagatctgcttttgtgtggttgttagtttggttttgtgttatccgtgtttaggaacaattgtaatccgtcatgtggatcctatcctgtttgtggtcaagttatgtgcttaatatgacatcgcacctttgttttgtgataa

SEQ ID NO: 46 - protein, 112 aa, Carthamus tinctorius
MMRLLTGTDNDTADSFQFVPTSIDAFGSTVIVEGCDQRRDISWIHAWTVSSDGIITQVREYFNTSLTVTRFGNCSSTKKPVSVTSSLHCPYLWESSLSNRVGKSVPGLVLAI

SEQ ID NO: 47 - DNA, 871 bp, Euphorbia esula
  misc_feature (808)..(812): n is a, c, g, or t
tggttcattttcatcatctccatttttaaaagctcctccttctctctctagaaattatcctctttctctctcttcgggctggctaactcacaggaaattctggacgaatcttccagaaagaaccaagaggtggttcttgccctctatgacgccttgagatctcgagacgtcggcacggtttcaaagatcctcgctcccgacctcgagtggtggttccacggccctccgactcaccaatttttgatgcaaatcctcaccggcgcggccaccacaactgattttgaattcaaacctgaatttgtccgggcgttcggttcaatcgtaatcgccgaaggctgtgacccgacccgctccatttcctggattcacgcctggactgtcaccgccgatgggataatctctcaggttagagagtacttcaatacttctctcactgttactcgtttcggaaatcaatctcaatcgccgtctgtttcttctacggcgggaataacgccggtgcattgcccgtccgtttgggagagcagtctctctaatcgggtcggcaaatcggtgccgggtttggttcttgcaatttaggtggacccgggatagaaagggactctgatcaagtgtgcgcgttactattataataaaattaagctagtggaataaagataggtggcacgtgttccgcgtgtgagtgagaaaaggagatgtgagtcagctaaggaaggggcggttgtttgttatgtgttgatttttattcgtattttgtgctatttttgttgtttagtttccttttttttgggtgttgaaaaacaaggannnnnaaatgggtcttaaatttgggttgtttgctgatgtaataaaaatgtcttattgtgatttt

SEQ ID NO: 48 - protein, 111 aa, Euphorbia esula
MQILTGAATTTDFEFKPEFVRAFGSIVIAEGCDPTRSISWIHAWTVTADGIISQVREYFNTSLTVTRFGNQSQSPSVSSTAGITPVHCPSVWESSLSNRVGKSVPGLVLAI

SEQ ID NO: 49 - DNA, 664 bp, Euphorbia tirucalli
cgggaaattctggacaatcatcgagaaagaaccaagaggtggttcttgccctctatgaggccttgagatcccgagacgtcgacacggtgcagaaaattctcgcccctgatctcgagtggtggttccatggtccgccgtctcaccagtttttgatgcgaatcctcaccggcgctgacaacagagctaattccaattcctccggtttcgaattcaaacctgaattcgttcaggctttcggttcaatcgtcatagctgaaggctgcgatccgacccgctccatttcctggatccacgcctggactgtctccgatgggataatttctcaggttagagagtacttcaatacttctcttactgttactcgattcggaaatcaagaacaaccgccggcgccatcgccatcgccctcggtttctcctgcttcttcgtcatcttcgtcatccacggcggggataacccctgtgcattgcccgtccgtttgggagagcagcctctccaatcgggtcgggaaatcggttccgggtttggttctggcaatttaagaggaaccgaaacagtaaccagaaagggtcgtatcaggtgtagcccgttagtatattgtactggaataaagacaggttgcaccgtgtgtgtcgtgtgaatgtgaacagggatgtgagtcagc

SEQ ID NO: 50 - protein, 129 aa, Euphorbia tirucalli
MRILTGADNRANSNSSGFEFKPEFVQAFGSIVIAEGCDPTRSISWIHAWTVSDGIISQVREYFNTSLTVTRFGNQEQPPAPSPSPSVSPASSSSSSSTAGITPVHCPSVWESSLSNRVGKSVPGLVLAI

SEQ ID NO: 51 - DNA, 1083 bp, Fragaria vesca
ctctcttctccttgttcgcttcacattcacattcatctccaaacccacctcgatttctgtacccgcctcgtgggcttaggctagaactggcgttatctcaagaacccgactccgattccgactccagcaatcaccggctggtcctgaccctctatgacgccttgagctcccgtgacgtggccaccgtccacaccatcgtcgccgccgacctcgagtggtggttccatggtccgccgacacaccagttcttgatgcgcatgctcaccggcgaaaaaaacgacgagtcgtttgtcttccgccctcagtctgtttgctccgtgggccccgtcgtcctagtggagggttccgacccagcgaaggagatctcctgggtgcacgcctggaccgtcacggatgggatagtcacccaggttagggagtacttcaacacttccctcaccgtcacccgcctcggtaactccacaaccaaatccaagatttccaaatcgacggccgagattacatcgtaccattgcccctccgtctgggagagctccaacccggtcgggaagtcggttccgggtctggtcctcgccatctgaaaaagtcctttttcttctctggcgcgtggtttttatttatctcttaaataagttattgttattatcaataagtgggggattacgtgtcgggagctgagtggcttctgcggatgggctgaagcggcttgggtcacggagatgtaacgtcccgttagagtttgttttggtttcggtttgttgtcttctagtttggtttggtttgttgtttttgtgtgtgtgctggtgttgggtggaaccatggggtcgagggccttttggtcatatcctgacgcgtctattttatgttgttctccgtatgcaataaaaacatgcgttttcgataatctctggagttcagttttgatgattagcgataatcggctgtcattaaccacatcgttacaatcaaggactaaaaaatcgggtttcggggaaatatcgatggtccgaaaattggatatttccacggaaatattgtggatatatcgaaagtatgaaaattaatatatttattatgatcttc

SEQ ID NO: 52 - protein, 109 aa, Fragaria vesca
MRMLTGEKNDESFVFRPQSVCSVGPVVLVEGSDPAKEISWVHAWTVTDGIVTQVREYFNTSLTVTRLGNSTTKSKISKSTAEITSYHCPSVWESSNPVGKSVPGLVLAI

SEQ ID NO: 53 - DNA, 769 bp, Gossypium arboreum
  misc_feature (769)..(769): n is a, c, g, or t
attttctcaaacattcttcaatcttttcatctctcctcagacccgatcgatctatcttcttgctccgttccctctttcaagaactggctaacacacaggaaccacttgtggaggaaactaacaagaaccaagaggtggttcttgccctctatgaggccttaaacactcgagacgtcgaaactgttcacaaaatccttgcccctgaccttgaatggtggttccacggtcccccgactcaccagtttttgatgcgcctgctcaccggtgcttcatcctacgattctttccgtttcgaggttgatcccctttcggttaccacctttgggcccaccgtcatcgtcgaaggctgcgatcacagccgttcaatctcttgggttcacgcttggaccgtaaccgatgggataattacccaagtgagggaatacttgaacacttctctcaccgttactcgccttggaaactctacccaatctccaccgtccgactacaatcctccatcatcatcatcatcatcgacgggtgagattacctcggtgcattgcccttccgtctgggagagcagcttttccaacagggttggaaaatccgtgccgggtcttgtcctggcaatttagtcatttcactatcatatatctctctgatcaggtgcagccgtgagtaggaataaaataaaataaagggagtactttcgtgtcagatccgtattggtcttctacttgcggatgcactaaaaaacagtgtcgcttaaggagagagagagagatcaaan

SEQ ID NO: 54 - protein, 121 aa, Gossypium arboreum
MRLLTGASSYDSFRFEVDPLSVTTFGPTVIVEGCDHSRSISWVHAWTVTDGIITQVREYLNTSLTVTRLGNSTQSPPSDYNPPSSSSSSTGEITSVHCPSVWESSFSNRVGKSVPGLVLAI

SEQ ID NO: 55 - DNA, 967 bp, Gossypium hirsutum
acgcgggggatcctcaccagttgtttctggtattttctcaaacattcttcaatcttttcatctctcctcagacccgatcgatctatcttcttgctccgttccctctttcaagaactggctaacacacaggaaccacttgtggaggaaactaacaagaaccaagaggtggttcttgccctctatgaggccttaaacactcgagacgtcgaaactgttcacaaaatccttgcccctgaccttgaatggtggttccacggtcccccgactcaccagttcttgatgcgcctgctcaccggtgcttcatcctacgattctttccgtttcgaggttgatcccctttcggttaccacctttgggcccaccgtcatcgtcgaaggctgcgatcacagccgttcaatctcttgggttcacgcttggaccgtaaccgatgggataattacccaagtgagggaatacttgaacacttctctcaccgttactcgccttggaaactctacccaatctccactgtccgactacaatcctccatcatcatcatcatcatcgacgggtgagattacctcggtgcattgcccttccgtctgggagagcagcttttccaacagggttggaaaatccgtgccgggtcttgtcctggcaatttagtcatttcactatcatatatctttctgatcaggtgcagccgtgagtaggaataaaataaaataaaaggagtactttcgtgtcagatccgtattggtcttctacttgcggatgcactaaaaaacagtgtcgcttaaagagagagagagatcaaaaatgtgaatttggttaagaccctggtccggagggtcatattaatatctgtttctacctaggtttgcttttgtggctggttccattggtattgtggtaacttggccatggatggggcactgtgtttggggaatcctccggccctttgtcccaaaaaaaattcgctattttt

SEQ ID NO: 56 - protein, 121 aa, Gossypium hirsutum
MRLLTGASSYDSFRFEVDPLSVTTFGPTVIVEGCDHSRSISWVHAWTVTDGIITQVREYLNTSLTVTRLGNSTQSPLSDYNPPSSSSSSTGEITSVHCPSVWESSFSNRVGKSVPGLVLAI

SEQ ID NO: 57 - DNA, 1352 bp, Gossypium hirsutum
ggttcacgcttggactgttcgtgatgggataatcacccaagtgagggagtatttcaacacttctctcaccgttactcgccttagagactctccaccgtcagcttgcagttcttcgacggcggagattgcgccagtgtattgcccttacgtttgggagagtagtctttccaaccgggtggggaaatcggttccaggtcttgttcttgcaatttagtttcctcctcccacgtgtggctaagataacagatgttagttccatgagttgagtttggtctggtgttaaaaattattgtgtctggactgtcaatttggtaacttattagtattgttgtgtttcaagtgttgtcttccaatgcaattggatttagtgaagtgtgtggggtccggtatgagaagagttcctccacctcctcattttcagtgtttccattgtgtaataaaaatctgctatcttcttcgattgcacaaaaccaaatcatctttgctttgctattttggttcgttttgctaagaactggctaacgcacagcaaaaaatcgtggaggaaaccaacaagaaccaagcggtggttcttgccctctatgaagccttaaacacacgagacgtcaacaccgttcaccaaatccttgctcccgatctagagtggtggttccacggtccacccactcaccagtttttgatgcgcttactcaccggcgcttcatccgacgatcctttccttttcgaggtcgaccctgttttagtcaccgcctttggatccaccgtcatcgtcgaaggctgtgacaacagccgttcgatctcctgggttcacgcttggactgttcgtgatgggacaatcacccaagtgagggagtatttcaacacttctctcaccgttactcgccttggagactctccaccgtcagcttgcagttcttcgacggcggagattgcgccggtgcattgcccttacgtttgggagagtagtctttccaaccgggtggggaaatcagttccgggtcttgttcttgcaatttagtttcctcctcccacgtgtggataagataacagatgtgagttccatgagttgagttgggtctggtgttaaaattattgtgtcagaactgtcaatttggtaacttattattgttgttgtgttgtgagtgttgttttccaatgcaattggatttagtgaagtgtgtggggtccagcatgagaagagttcctcctcctccttctcattttcggtgtttccattgtctaataaatatctgctatcttcttcactttcttattattgcagatacttctacttcttttctccttattattttaaaagtaagacccccctattgtctcgtcctctgcctgat

SEQ ID NO: 58 - protein, 112 aa, Gossypium hirsutum
MRLLTGASSDDPFLFEVDPVLVTAFGSTVIVEGCDNSRSISWVHAWTVRDGTITQVREYFNTSLTVTRLGDSPPSACSSSTAEIAPVHCPYVWESSLSNRVGKSVPGLVLAI

SEQ ID NO: 59 - DNA, 992 bp, Glycine max
aactcaaacaacaaaaataagacattgtttggtttggttacttgctcgaatttcctcgaatcgcttaatttgtatttgattagttaaaccgcaacgcggaatctcttttctcgaactggctaactctcaggcaagtggttcggacgctgattccagcaacaagcggctggtgctcgcactgtatgacgccctaaactccggcgactccgacgccgtcgtcaagatcgtcgccgccgacctcgagtggtggttccatggtccgccctcacaccagtttttgatgcgcatgctcaccggcgactccgctgccgacaactccttccgcttccttccgcagtccatcgccgccttcggctccaccgtcatcgtcgagggctgcgacaccgcccgcaacattgcctgggtccacgcctgcaccgtcacggatgggataattactcagatcagagagtacttcaacaccgccctcaccgtcacccgcatccacgattccggcgagattgttccggctagctccggcgccggccgtttgccctgtgtctgggaaagcagcgtctccggtcgggtcgggaaatccgtacccggtttggttcttgcaatataaaataattattaacaagtaattagggaagaacgcggtcacgtgtgaataataattaaataaggaggttgtgcacgtggcggtgactgggtcgaacggtttcagggaacattgatatattttcgtagtattggtgtgttctagaggttagagagatgtgagaccctattggtggggtttcttatttctttaattttctcaggtttggtttgtttttgttttgtttgcttgtgtgttttgggaaccactatgggcctatccaggtggctgtatctttcttttgtaatgcggtttgttgatgatgatgatgatgcaataagaatatctatggattatggttttaagaactgtgttgtgatgatgctaaattcgtttattattttatttagta

SEQ ID NO: 60 - protein, 107 aa, Glycine max
MRMLTGDSAADNSFRFLPQSIAAFGSTVIVEGCDTARNIAWVHACTVTDGIITQIREYFNTALTVTRIHDSGEIVPASSGAGRLPCVWESSVSGRVGKSVPGLVLAI

SEQ ID NO: 61 - DNA, 477 bp, Glycine max
gagctggcaaactcgtcgcaaaaaccatggctagaggatcaagaggatcccaacaagagaggggtgatagacttgtacaacgccatactctccaatgacactgacacaatgcagcgccttctagctccagacctggagtggtggttccacggtccaccgtgtcaccgccaccacctcgttcccctcctcacgggctcctcgtcgaagcctttagtccctgatctcgtagttgggtttggatcagtgactattgctgaaggcttcgacgagagcaacttggtgtggtgggtacatgcatggaccaccactgacgaaggcatcatcacggaggttagagagtatgtcaacacttccgtcactgtcaccaagctcggtttgcatgtgaacaacgatgatgttgtttctgccacgtgtcagagtgtctggcagagcaagctctgcgatgagtctgttccgggactcattcttgccatctag

SEQ ID NO: 62 - protein, 122 aa, Glycine max
MQRLLAPDLEWWFHGPPCHRHHLVPLLTGSSSKPLVPDLVVGFGSVTIAEGFDESNLVWWVHAWTTTDEGIITEVREYVNTSVTVTKLGLHVNNDDVVSATCQSVWQSKLCDESVPGLILAI

SEQ ID NO: 63 - DNA, 893 bp, Glycine max
tttggtttggtttggttacttgaaaatctcgaatcgcttaattttgatttagttttccaccgcaacgcggaacctctttctcgaactggctaactctcaggcaagtggctcggacgctgattccagcaacacgcggctggtggttgcactgtatgacgccctaaactccggcgactccaacgccgtcgtcaagatcgtcgccgccgatctcgagtggtggttccatggtccgccctctcaccagtttttgatgcgcatgctcaccggcgactccgccgccgacaactccttccgattcgttccgcagtccatcgccgccttcggctccaccgtcatcgtcgagggctgcgactccgcccgcaacattgcctgggtccacgcctggaccgtcactgatgggatgatcactcaaatcagagagtacttcaacaccgccctcaccgtcactcgcatccacgattccggcgagattgttccggccagatccggcgccggccgtttgccctgcgtctgggagagcagcgtctccggtcgggtcgggaaatccgtccccggtttggttctcgcaatataaaatataaaataagtaattagggaaggacgaggtcacgtgttgccgttgctataataattaaataagggacttgtgcacgtggcggtgactggatcgatcggtttcagggaacattgatactttgtgttagtattggaggttagggagatgtgagagctttgttgttattggtgtggtttgttttgtttgcttgtgtgtttttcaccactatgggcgtattcaggtggttgtatctttcttttgttatttggagtgttgatgatgatgcaataagaatatctatggactatgcttttaagagttgggttgtgatgatgcc

SEQ ID NO: 64 - protein, 107 aa, Glycine max
MRMLTGDSAADNSFRFVPQSIAAFGSTVIVEGCDSARNIAWVHAWTVTDGMITQIREYFNTALTVTRIHDSGEIVPARSGAGRLPCVWESSVSGRVGKSVPGLVLAI

SEQ ID NO: 65 - DNA, 953 bp, Glycine max
cattcccaccaacattgattccataaatacatagctttcttccttaatttgaaagtaaagaagcaataccaagtacaatctctctactttcagcgtgcttgatttcacattttgaatgcaattttctaaattttagaaactagtagttataattttcacgtcttaaacgtgtgattctttcattttcgagtttctaaacctcttacgagaaccattcctagtatatgtttacttgtgttccggagctggctaactcacaatcacaagaatgcttggaggaatatgtggaacgcaacacgagagtggtcacagagttatacaaagccctaacctccaaagaccccgagacgctccatgggcttgtgacccaagacttggagtggtggttccacggcccaccatgccatcggcaccacttggtcccctggctcacgggctcctcaccctcctcaaaggctttggttccacaacacatggtgggctttgggccagtggtaattgctgaagggtttgatgatgaccatttggtgtggtgggtgcacgcgtggaccgtcactgctgatgggctcataactcaggtcaaagagtatgtgaacacttccgtgaccgtgactcttttatcacaacaagtgcttccaaatgcttccaagtgtcaatgcatttggcagagtaggctttgtgatgaatctgtgcctggacttattctgccaatctagggtattagaattagatggtggttgggtttcaaaagttcaccatgccacatagtgagtggtgcatgtcacgtagtttatatatgtgcacgtaattgggtctatactgtgagtgtgcttgtttttgtgcaattgtgtgggttttgtgacatttagtaattgtatgttatgctatggtttggggctgttgaaatagtgggtgtttatataaatattaacaacgtatcatcatcttttatt

SEQ ID NO: 66 - protein, 163 aa, Glycine max
MFTCVPELANSQSQECLEEYVERNTRVVTELYKALTSKDPETLHGLVTQDLEWWFHGPPCHRHHLVPWLTGSSPSSKALVPQHMVGFGPVVIAEGFDDDHLVWWVHAWTVTADGLITQVKEYVNTSVTVTLLSQQVLPNASKCQCIWQSRLCDESVPGLILPI

SEQ ID NO: 67 - DNA, 855 bp, Gossypium raimondii
cttttgattgcacaaaaccaaatcatctttgctttgctattttggttcgttttgctaagaactggctaacgctcagcaaaaaatcgtggaggaaaccaacaagaaccaagcggtggttcttgccctctatgaagccttaaacacacgagacgtcaacaccgttcaccaaatccttgctcccgatctagagtggtggttccacggtccacccactcaccagtttttgatgcgcttactcaccggcgcttcatccgacgatcctttccgtttcgaggtcgaccctgttttagtcaccacctttggatcaaccgtcatcgtcgaaggctgtgacaacagccgttcgatctcctgggttcacgcttggactgttcgtgatgggacaatcacccaagtgagggagtatttcaacacttctctcaccgttactcgccttggagactctccaccgtcagcttgcagttcttcgacggcggagattgcgccggtgtattgcccttacgtttgggagagtagcctttccaaccgggtggggaaatcagttccgggtcttgttcttgcaatttagtttcctcctcccacgcgtggttaagataacagatgtgagttccatgagttgagttgggtctggtgttaaaattattgtgtcagaactgtcaatttggtaacttattattattgttgtgttgtgagtgttgttttccaatgcaattggatttagtgaagtgtgtggggtccagcatgagaagagttcctcctcctccttctcattttcagtgtttccattgtctaataaatatctgctatcttcttcactttcttattattgcagatacttctacttcttttctcctaaaa

SEQ ID NO: 68 - protein, 112 aa, Gossypium raimondii
MRLLTGASSDDPFRFEVDPVLVTTFGSTVIVEGCDNSRSISWVHAWTVRDGTITQVREYFNTSLTVTRLGDSPPSACSSSTAEIAPVYCPYVWESSLSNRVGKSVPGLVLAI

SEQ ID NO: 69 - DNA, 920 bp, Helianthus annuus
cgggatcaactcccgggttttgttttcaccaattatccaaaactctctctctctcctaaaccccccaccctaaccactggctaaccctcaagaagctctggaggattccagcaacaagagcgtggtgctccagctctaccatgccctaagctcccgtgacgtcgacaccgtccacaagctcctagcccctgacctcgagtggtggttccatggccctccctctcaccaatatatgatgcgattgctcactggaaccgacaacaacgaagacaccaactatttcaactttgttcctcattccgttgacgcgtttggatccacagtcatcgctgaaggctgcgatcaggaccgtcagattttctggatccacgcctggactgttaactcatctggtataattactcaggtaagagagtatttcaacacgtcacttactgtaacccgttttgggagtaacgggtcgaaacccgtgtccattacctcgctccattgtccctctgtttgggagagtagtctctcgggtcggggcgggaagtccgttccgggtttggtgcttgctatatagtaccgggtcggatattcggatcccctgtggctgctacttgatattgttgtttgtttgttatcgtgtggtttaaataaataaaagaataagtcaaagttggaccagcggatatcctatgggttgaagtaactaccgtggtgacctgcgtcagcgaggatgtagagatcaacggctgagatttgtggggactgtttggttacagctttttattatttgggtttgtttggttgtttattttctgtttggttttttgtttgtttgtgtggtttgtggtttgtaattctgatcaaggatatgggggtactctccgtttcttggttgttttcagttgttttaatgaaaatgctttatattg

SEQ ID NO: 70 - protein, 110 aa, Helianthus annuus
MMRLLTGTDNNEDTNYFNFVPHSVDAFGSTVIAEGCDQDRQIFWIHAWTVNSSGIITQVREYFNTSLTVTRFGSNGSKPVSITSLHCPSVWESSLSGRGGKSVPGLVLAI

SEQ ID NO: 71 - DNA, 582 bp, Helianthus annuus
tggcctcgcaacgggagcgtggtgctctccctctaccacgcgctaacctcacgcgacgttcaactcgtgaccaaactcctagcccctgacctcgagtggtggttccatggccccccgtcccaccagtttatgatgcgattactcaccggaactgataccgtcactgactcttttgaattcgtgcctcggcccattgacgcctttggatctactgtgatcgttgaaggctgcgatcagtcacgtgatatctcttggattcacgcctggactgttgactcgtatgggataattacgcaagccacggagcattttaatacttcgcttactgttactcactttggtagctccaacaaatcggtttctgctaccgggtcgcactgcccttccgcttgggagagtagtttgtcgaatcgggttggaaagtctgttcctggattggttctggctatataactggagctaagttggatgtatgtatgcatctggtttgtgtggtaataagaagcttgtgtggctttggaagtagtgttagttatccgctatgacgatcgaatcctgtatgtggttaagttatgttgatgt

SEQ ID NO: 72 - protein, 107 aa, Helianthus annuus
MMRLLTGTDTVTDSFEFVPRPIDAFGSTVIVEGCDQSRDISWIHAWTVDSYGIITQATEHFNTSLTVTHFGSSNKSVSATGSHCPSAWESSLSNRVGKSVPGLVLAI

SEQ ID NO: 73 - DNA, 771 bp, Helianthus exilis
tcactcctcgggtccttttttcaccaattgtcccaaactctctctcctagaccccccaccctaaccactggctaaccctcaagaagctctggaggattccagcaacaagagcgtggtgctccagctctaccatgccctaagctcccgtgacgtcgacaccgtccacaagctcctagcccctgacctcgagtggtggttccatggccctccctctcaccaatatatgatgcgattgctcactggaaccgacaacaacgaagacaccaactatttcaactttgttcctcattccgttgacgcctttggatccacggtcatcgctgaaggctgcgatcaggaccgtcagattttctggatccacgcctggactgttaactcatctggtattattacacaggtaagagagtatttcaacacgtcacttactgtaacccgttttgggagtaacgggtcgaaatccgtgtccattacttcgctccattgtccctctgtttgggagagtagtctctcgggtcggggcgggaaatcggttccgggtttggtgcttgctatatagtaccgggtcggatattcggatcccctgttgtggctgctacttgatattgttgtttgtttgttatcgtgtggtttattaaattaatagaagaataagtcaaagttggaccagcggatatcctatgggttgaagtaactaccgtggtaacctgcgtcagcgaggatgtagagatcaacggctgagatttgtggggactgtttggttacagcttttca

SEQ ID NO: 74 - protein, 110 aa, Helianthus exilis
MMRLLTGTDNNEDTNYFNFVPHSVDAFGSTVIAEGCDQDRQIFWIHAWTVNSSGIITQVREYFNTSLTVTRFGSNGSKSVSITSLHCPSVWESSLSGRGGKSVPGLVLAI

SEQ ID NO: 75 - DNA, 826 bp, Helianthus paradoxus
attccagcaacaacaagagcgtggtgctccagctctaccatgccctaagctcgcgtgacgtcgacaccgtccacaagctccttgcccctgacctcgagtggtggttccatggccctccctctcaccaatatatgatgcgattgctcactggaaccgacaacaacgaagacaccaactatttcaactttgttcctcattccgttgacgcctttggatccacggtcatcgctgaaggctgcgatcaggaccgtcagattttctggatccacgcctggactgttaactcatctggtattattacacaggtaagagagtatttcaacacgtcacttactgtaacccgttttgggagtaacgggtcgaaatccgtgtccattacttcgctccattgtccctctgtttgggagagtagtctctcgggtcggggcgggaaatcggttccgggtttggtgcttgctatatagtaccgggtcggatattcggatcccctgtggctggctgctacttgatattgttgtttgtttgtttgtttgttaacgtgtggtttaaattaataaaagaataagtcaaagttggaccagcggatatcctatgggttgaagtaactaccgtggtaacctgcgtcagcgaggatgtagagatcaacggctgagatttgtggggactgtttggttacagctttttattatttgggtttgtttggttgtttgttttctgtttggttttttgtttgtttgtgtggtttgtggtttgtaattcagatcaaggatatgggggtactctccgtttcttggttgttttcagttgttttaatgaaaatgcttta

SEQ ID NO: 76 - protein, 110 aa, Helianthus paradoxus; identical to SEQ ID NO: 74

SEQ ID NO: 77 - DNA, 718 bp, Helianthus petiolaris
gcggggccattctccgaccactaaatcagaactggccaccttaaagaccaacctctggagtcggcatccggcaacgggagcgtggtgctctccctctaccacgcgctaacctcacgcgacgttcaactcgtcaccaaactcctagcccctgacctcgagtggtggttccatggccccccgtcccaccagtttatgatgcgattactcaccggaactgataacctcaccgactcttttgaattcgtgcctcggtccattgacgcctttggatctactgtgatcgttgaaggctgcgatcagtcacgtgatgtctcttggattcacgcctggactgttgactcgcatgggataattacgcaagttagggagtattttaatacttcgcttactgttactcactttggtagctcctccaataaaccggtttctgttaccgggttgcattgtccttcggtttgggagagtagtttgtcgaatcgggttggaaagtctgttcctggattggttctggctatataagaacaagattggagcttatgcatctggtttgtgtggttaataacaagtttttgtggttttggaagtagtgttagttatccgttatgaggattgtatcctgtttgtggttaagttatgttgttgatgtaaaatcgtacctttgttctatgatggatttgttttgtgttgatttcccgatgtctatgttttgttacaagat

SEQ ID NO: 78 - protein, 108 aa, Helianthus petiolaris
MMRLLTGTDNLTDSFEFVPRSIDAFGSTVIVEGCDQSRDVSWIHAWTVDSHGIITQVREYFNTSLTVTHFGSSSNKPVSVTGLHCPSVWESSLSNRVGKSVPGLVLAI

SEQ ID NO: 79 - DNA, 856 bp, Helianthus petiolaris
gcggggatcaactcccgggttttgttttcaccaattatatatcccaaaactctctctcctaaaccccccaccctaaccactggctaaccctcaagaagctctggaggattccagcaacaagagcgtggtgctccagctctaccatgccctaagctcccgtgacgtcgacaccgtccacaagctcctagcccctgacctcgagtggtggttccatggccctccctctcaccaatatatgatgcgattgctcactggaaccgacaacaacgaagacaccaactatttcaactttgttcctcattccgttgacgcctttggatccacggtcatcgctgaaggctgcgatcaggaccgtcagattttctggatccacgcctggactgttaactcatctggtattattactcaggtaagagagtatttcaacacgtcacttactgtaacccgttttgggagtaccgggtcgaaacccgtgtccattacctcgctccattgtccctctgtttgggagagtagtctctcgggtcggggcgggaagtcggttccgggtttggtgcttgctatatagtaccgggttggatattcggatcccctgtggctgctacttgatattattgtttgtttgttatcgtgtggtttaaattaatagaagaataagtcaaagttggaccagcggatatcctatgggttgaagtaactaccgtggtgacctgcgtcagcgaggatgtagagatcaacggctgagatttgtggggactgtttggttgcagctttttattatttgggtttgtttggttgtttattttctgtttggtttttgtttgtttgtgtggtttgtggtttgaaattctgatca

SEQ ID NO: 80 - protein, 110 aa, Helianthus petiolaris
MMRLLTGTDNNEDTNYFNFVPHSVDAFGSTVIAEGCDQDRQIFWIHAWTVNSSGIITQVREYFNTSLTVTRFGSTGSKPVSITSLHCPSVWESSLSGRGGKSVPGLVLAI

SEQ ID NO: 81 - DNA, 686 bp, Ipomoea batatas
tacggccggggatcctcaccttttctcaaaggtttatttgttctcttcatctctctctctgtaaatcacacttccctccatttctctctctctctttctctgtatctatctgtttctctctctatatatattttccggtctggctaacattcaggaaactctggaggagaccagaaacaagagggtggtgctcgccctgtatgaagccttgagctctcgagacgtggatttggtccagaaacttctggcctctgacctagagtggtggttccatggtccgccgtcccaccaatttttgatgcgcatcctcaccggcactgctaattccggcgattccttccgatttgagcccctcaaagtcgacgccattggccccactgtcttcgtcgagggccaagacctagctcgcaacatcacctgggtccacgcctggtccgtcacggatgggataatcacccaggtccgcgagtacttcaacacctccctcaccgtcactcgcctcggtaaccagtcacgcgccgccgccgccacctccgccttcacgcccctccactgcccttccgtctgggagagcagcctctccaatcgggttgggaaatccgtcccgggtctcgtcctcgcaatataacccgacccgacccgtttacacccaatccccccaatctctactgcttaacataaataaa

SEQ ID NO: 82 - protein, 109 aa, Ipomoea batatas
MRILTGTANSGDSFRFEPLKVDAIGPTVFVEGQDLARNITWVHAWSVTDGIITQVREYFNTSLTVTRLGNQSRAAAATSAFTPLHCPSVWESSLSNRVGKSVPGLVLAI

SEQ ID NO: 83 - DNA, 697 bp, Ipomoea batatas
aaaggggtggtgctcgccctatatgaagccttgagctcacacgacgtcgttcaggtccagaaactactggcctccgacctcgagtggtggttccatggtcctccttctcatcaatttttgatgcaaatactcaccggcactgctaaattcgataacgcctcttttcaattccttcataagaccattgacgtattcggttccgttgttctcgttgaaggttgtgacccaacccgatctattacttgggttcacgcctggactgttacagatggggtaattacccaggttagggagtatttcaatacctcacttactgtcacccgttttgggaaatcggatatttcctcaattacgactctgcattgcccatctgtttgggagagtagcttacctaatcgggtcggaaaatctgttccgggtcttgtattggctctataagaaacgacccgatttgtgctggcgttgtatcttgtgtctagtaggatgtaagattaacgcggctggtttgggattctgttgctatttggtttgatttggtttgtttttattttttaagttgggatttgtgttctgtttattatttgttgttgtgattgagttaaagaaggggccaatgataattggatatacctttctactcaatagattgtctaattatgtattggtttgcaataaaaagcatattgattggctgttt

SEQ ID NO: 84 - protein, 105 aa, Ipomoea batatas
MQILTGTAKFDNASFQFLHKTIDVFGSVVLVEGCDPTRSITWVHAWTVTDGVITQVREYFNTSLTVTRFGKSDISSITTLHCPSVWESSLPNRVGKSVPGLVLAL

SEQ ID NO: 85 - DNA, 866 bp, Ipomoea nil
atcttcaccttttctcaaaggtttgttctcttcttcctccataagaacaacacttctctctctctctgtatctatctttttctctctctctctgtcttccggtctggctaacattcaggaaactctggaggagaccagaaacaagagggtggtgctcgccctgtatgaagccttgagctcccgcgacgtggatttggtccagaaacttctggcctctgacctagagtggtggttccatggtccgccgtcccaccagtttttgatgcgcatcctcaccggcactgcaaccgccggcgattccttccgatttgagcccctcaaagtcgacgccattggccccaccgtgttcgtcgagggccaagacctgtctcgcaacatcacctgggtccacgcctggaccgtcacggatgggataatcacccaggtccgcgagtacttcaacacctccctcaccgtcactcgcttcggcaaccattccgcctccgccgccgccgccgctatcactcccctccactgcccttctgtctgggagagcagcctccccaatcgggttgggaaatcggtcccgggtctcgtcctcgcaatctaacccgacccgatccattcccataaataaaaaataaaaagcgcgtgtttttatttcgtatgggctgaaggggcaccgtcggatcttgcgtctgcgaggatgtgagatggacggctaggattcgtcgtccctgtttcgtttgacgtttttagtttgtgttttggtttgcgttgcgtgtggagtccgaccggccatgatggtccgacgacgacgacacgcaatatgcgtgtcggatgatacgtacgatgtatctcgtgtttggtttgcaataaactcgtgt

SEQ ID NO: 86 - protein, 108 aa, Ipomoea nil
MRILTGTATAGDSFRFEPLKVDAIGPTVFVEGQDLSRNITWVHAWTVTDGIITQVREYFNTSLTVTRFGNHSASAAAAAITPLHCPSVWESSLPNRVGKSVPGLVLAI

SEQ ID NO: 87 - DNA, 1089 bp, Juglans regia
tgtgttggtcccggggatcggccattacggccggggagcccatctatcgcattaccccctgctctccctccagccctttctgtttcctcctttcctcatctaaaacttgagacccaccgccctagctaggcttaggctagaactggctaactttcaggaaactctggaggaaactgattccagtaatcgaagggtggttctcgccctctatgaagccctgagctcgcacgacgtggccacggtgcaccagatcgtcgcccccgacctcgagtggtggtttcatggtccgccttctcaccagttcttgatgcgccttctgaccggcactgccctcgcttctgccacatctttccgatttgtccctcagtccatcacttccttcgggcccaccgtcctcgtcgagggctgcgaccacgcccgctctatttcctgggttcacgcctgcaccgtcactgatggggtaatcactcaggtcagggagtacttcaatacatccctcaccgtcacgcgcctcggtaactccaactcatcttcaacgctgtcggatttctcttccacgccgtcatcctcatcaacggttgagataacgccgctccattgcccgtccctttgggagagcagcgtctccagccaggtcggaaagtcggtgccgggtctggtcctggcgatatagtactattttctccctatattcctccgatcagctgcagtcgttactattattaaaaataaataaaagtgcacaggtgtcagcccctgattgagtgaatcacttatgggctgagctggattgccgtaaaagatcaagtcggagagatgtaagctccttattaaggtcgtgtatgggtgtgggtttgcttgtttggctggcatcctagtttgtatgtttgcgtgcctgtctgtctgtctgtctgtctttctggttgtcgtgtttagtatcgcggtggtgttggattgatcgtgtgtgaaggacgtggaaaccatgacggtggaatattcgtattggtcatataccgatgcatttcatgtaatctcgtgttttggttgtgcaataaagatatatgctcgtgattgtgatatgatttttct

SEQ ID NO: 88 - protein, 121 aa, Juglans regia
MRLLTGTALASATSFRFVPQSITSFGPTVLVEGCDHARSISWVHACTVTDGVITQVREYFNTSLTVTRLGNSNSSSTLSDFSSTPSSSSTVEITPLHCPSLWESSVSSQVGKSVPGLVLAI

SEQ ID NO: 89 - DNA, 1004 bp, Juglans regia
ggggggccctttctttctgcatcttcctctcactccgtgtccaaaaccttatttaattaagacccaccgcctactgccgagctaggcttggtctagaactggctaactctcaggaaactctggaggaaaccgattccagtaatcaaagggtggttctcgccctctatgcggccctgagttcgcacgacgtggccacggtgcaccagatcgtcgcccccgacctcgagtggtggtttcatggtcctccctcccaccagttcttgatgcgccttctgaccggcactgcccctgcctctgccacatccttccgattcgtcccgcagtccatcacttccttcgggcccaccgtccttgtggagggctgcgaccacgccctctctatttcctggattcatgcctgcaccgtctctgatgggataattactcagatcagggagtacttcaacacgtccctcaccgtcacgcgactccggaactccggtccatcgtcaccgccatcagatttagcttctacgaggtcctcatcatcgacggctgcgatcacgcccctccattgcccgtccctttgggagagcagcgtctccagttggttcggaaagtccgtgccgggtctggtcctggcaatatagtaccatctctctctgtgatcagctgcatccgttactatagtaaaaacaaataaattaaagggtgcgcagtaatcagcccctgattgagtgaaatacttatgggctgagctaaatttccgtattagatcgagtcagagagatgtaaaagctccttattacggtcgtgtttggcatggtttgttcggctttggcatcttggtatgtttgcgtgtgcccgtctgtctttcgggttgtcctgtttagtcgtggtgtctgtcttgattttgtgtgttggtacgtggaaaccataatggtggaacattcctattggttatatcctgacgtatctgtaatctcgtgttttggttgcgtaataaaggtatttgcttgtgctcg

SEQ ID NO: 90 - protein, 121 aa, Juglans regia
MRLLTGTAPASATSFRFVPQSITSFGPTVLVEGCDHALSISWIHACTVSDGIITQIREYFNTSLTVTRLRNSGPSSPPSDLASTRSSSSTAAITPLHCPSLWESSVSSWFGKSVPGLVLAI

SEQ ID NO: 91 - DNA, 663 bp, Lupinus albus
  misc_feature (592)..(592): n is a, c, g, or t
  misc_feature (619)..(621): n is a, c, g, or t
ggcacgagcaatttcaattcccaaaatcacttttttttccttattctacaaaaaccctaaagatctggctaacttttgtgtagaagctgattccagcaatcagaagctggttctaactttatatgaagccttaaactcttcagattcagacaccgtcgtgaaaaccgttgcttcagatcttgagtggtggttccatggtccaccctctcatcaattcttaatgcttcttctcaccggcgaaaccgttaacgatttccgtttcgttccacaatctcttgtatcattcggtaacaccgttatcgtcgaaggttgtgacggtaaccgtaacatatcttgggtgcacgcgtggaccgtaacggatgggataattactcaggtcagagaatatttcaacacttcacttaccgttactcgaattggagaatattctgattctgattccggttcagaatccggttcaagttctgaaccggtttggtttccttctgtttgggaaagtactgtctcgaaccgggttgggaaatcggttcccggtctggtcctggcaatataaaaaaataagattataatttggttggtgacacgtggctanaaagatgttagagacttgtttggtttnnnagtattattaatcttggtgtgtgaagtagtatgggtttattc

SEQ ID NO: 92 - protein, 110 aa, Lupinus albus
MLLLTGETVNDFRFVPQSLVSFGNTVIVEGCDGNRNISWVHAWTVTDGIITQVREYFNTSLTVTRIGEYSDSDSGSESGSSSEPVWFPSVWESTVSNRVGKSVPGLVLAI

SEQ ID NO: 93 - DNA, 537 bp, Limonium bicolor
ctgcatgaattcggcacgatgcctcgtgccgaattctggcacgatgctcttaaccaacgacgaatccactccaccatcgccaccgcagtttgaattctaccctcaatccatcaccgccatcggttctgtcgtcctggcggaatggtgcagtggtaagttcgcttgggttcatgcttggactgtttcatctgatggagtgattacccaagtcagagagtatttcaacacctctgttactgttactcgattccttgcggctcaatctcttcccacggagattgtggctgttgctgctgctgcggcgtcgacgacgacatctaagtcttccagccgttgtcagcgtgtttgggagagtatgctgtcgaatcgggttggaaagtcggttccgggtcttgttctcgcgctctgaatctttggattctcagatattgatcgattgtcggtaagcaattgacgccggtctctgtctggaactgtacaggtctggcgtttgaaaattacgtgtgctctgagtctagaggttaaataaatcccgag

SEQ ID NO: 94 - protein, 134 aa, Limonium bicolor
MNSARCLVPNSGTMLLTNDESTPPSPPQFEFYPQSITAIGSVVLAEWCSGKFAWVHAWTVSSDGVITQVREYFNTSVTVTRFLAAQSLPTEIVAVAAAAASTTTSKSSSRCQRVWESMLSNRVGKSVPGLVLAL

SEQ ID NO: 95 - DNA, 848 bp, Lotus japonicus
ggaccaaactcgaagaagaaatcaccaccattttctcttcataaccaaaaacctctttctcgaactggctaaccctcaagattcctcctccgattccagcaaccagaggctggttctcaccctctatgacgccttgaacgctcgagactccgacactgtcgtcaacaccgttgctccagatctcgagtggtggtttcacggcccaccctctcaccagtttttgatgcgcatgctcaccggcgaggactcctcctcctcctcctccgacaccgacaccaccgccttccgattcgttccgcagtcgctcgcgtcgttcggatccaccgtcatagtcgaaggctgcgacacctcacgcgccatttcgtgggttcacgcgtggactgtctcggatgggataattacccaggttagggagtatttcaacactgccctcactgttactcgcttctccaaatccgggtcgccggagattgtcccggcggagaaccgctccggcagcttcccgtgtgtttgggagagtagcgtctccgatcgggtcaggaaatccgtacccggtttggttctcgctatttaaaaaatattaaaaattaaggaaaattagtagtaagaaagaaataaaggcttgtcgacgtggcggtctgtggttggtttggtttcacacctttacgcgggtgatgtgagaccctgctgctttaggtgtggtggttgattttgagtttgtcgtattttatcttgtttgttagttggtttgggcctttcaagttatgggtgtctccactaggttgtattcttgtgtttttgtaataatgtggtgttttgatgatgcaataaaagtatgtgtggatctt

SEQ ID NO: 96 - protein, 116 aa, Lotus japonicus
MRMLTGEDSSSSSSDTDTTAFRFVPQSLASFGSTVIVEGCDTSRAISWVHAWTVSDGIITQVREYFNTALTVTRFSKSGSPEIVPAENRSGSFPCVWESSVSDRVRKSVPGLVLAI

SEQ ID NO: 97 - DNA, 779 bp, Lactuca perennis
gcgggggagtccgatcccggtccatccttttccgaggctaatatcttacagaactggccaactttcaagaagctctggaggattccggcaacgggagcgtggtgctctccctataccatgcgttaagctctcgcgacgtccaagtcgtccacaaactcttagctcctgatctcgagtggtggtttcatggccctccgtctcatcagtttatgatgcgattgctcaccagaactgataacgaaatcaccgactcctttgaatttgtacctctatcgattgacaccttcggatctacagtcattgtcgaaggctgcgatcaacgccgtgatatttcctggatccacgcctggactgtcaattcgcatgggataatcacacaggttagggaatacttcaacacttccctcactgtcactcggttcgttaactctaccaaacctgtttccgttacttcgctacattgcccttccgtttgggagagtagtctcgctaatcgcgtcggaaaatctgttcctggtttagttctagcaatataaaatacgaatcatatcagtgaataagagcaaatcaaagtcgttttagattttgattttaataaaagtagagctaccgtggtatcctgcatctgagaggatgtaagatattcacggctagtttatgtggttatcagtttcgttttctgctagctgtgtttcggaataagtgtaatacaccatgtggatcctaccctgtttatggtcaatctatttcgttgatataaaatcgtacgtttattttaa

SEQ ID NO: 98 - protein, 108 aa, Lactuca perennis
MMRLLTRTDNEITDSFEFVPLSIDTFGSTVIVEGCDQRRDISWIHAWTVNSHGIITQVREYFNTSLTVTRFVNSTKPVSVTSLHCPSVWESSLANRVGKSVPGLVLAI

SEQ ID NO: 99 - DNA, 781 bp, Lactuca sativa
ttcatggtgttagcagcacggttcatagtgggacccagcatcgagtagttactcgaccctggatggacctgtcggttcccaccaggcaatccagtgatattactattttgccctccccccgaccccaacagcttcggaaatcaattctatttctctctctaaaggtacccacaagacgtcaatttctgaccgaactggctaaccctcaagaagctctggaggattccagcaataagagcgtggtgctccagctctaccatgccctaagctgccgcgacgtcgacaccgtccacaagctcttagcacctgacctcgagtggtggttccatggccctccgtctcaccagtatatgatgcgattgctcaccggaaccgacaacgacaacaccgactccttcgaattcgttcctctttccattgacgcgtttggatctacagtcatcgtcgaaggctgcgatcaggatcgcgaaatctcctggatccacgcctggactgttaactcgtatggcataatcactcaggtacgggagtacttcaacacttccctcactgtcactcgtttcggtactactactactactaactcttccaaatcccgctccattacttcgctccattgtccttctctttgggagagcaccctctctaatcgggtcggaaaatctgtcccgggtttggtattggccatatagtaaaacgggctgatcttctttatattaaataaatacgtgtcgtgtgcttgctttgataaaacataataaagtcaaagtcaagaatttgg

SEQ ID NO: 100 - protein, 209 aa, Lactuca sativa
MDLSVPTRQSSDITILPSPRPQQLRKSILFLSLKVPTRRQFLTELANPQEALEDSSNKSVVLQLYHALSCRDVDTVHKLLAPDLEWWFHGPPSHQYMMRLLTGTDNDNTDSFEFVPLSIDAFGSTVIVEGCDQDREISWIHAWTVNSYGIITQVREYFNTSLTVTRFGTTTTTNSSKSRSITSLHCPSLWESTLSNRVGKSVPGLVLAI

SEQ ID NO: 101 - DNA, 625 bp, Musa acuminata
cttcctttcccttggtgcgtgcgagcgcggcaagagaggcgagagagagagagcgagagccagagtggctcagaccggaactggctaacgagagcggagagagcgtgaaggaccgcaacaagtgggcagtgctcacgctgtatgaggccctgaacgtgcgggacgtggagcgggtgcagcagctgctggcccccgacatcgagtggtggttccatggtccgccggagcaccagcacatgatgcgcatgctcaccggcgcggactacgaggagacaaccgccgccgccgccttccagttcaagcccgagcgagtcgccgccttcggctccaccgtcgtcgccgagggcagcggccccgacgccgacaccgcgtgggtccacgcctggaccatcgccccggatgggataatcacccaggtccgcgagtacttcaacacctccctcaccatcacccgagtcgccgccgactcggcctccaaatccgccgcttcctgctcctcctcttcttcctccgggtcggctcacgggactcccgtgtgggagagcagccgccccgagcgagccgggaagtcctttcctggcctcgtcctggctatctaaatcgacataatcccaaataataagtt

SEQ ID NO: 102 - protein, 120 aa, Musa acuminata
MMRMLTGADYEETTAAAAFQFKPERVAAFGSTVVAEGSGPDADTAWVHAWTIAPDGIITQVREYFNTSLTITRVAADSASKSAASCSSSSSSGSAHGTPVWESSRPERAGKSFPGLVLAI

SEQ ID NO: 103 - DNA, 705 bp, Musa acuminata
gtcgcccaccgagtcgtgagttgttccgagttagagcttcccaagagggagagggagagggagagggggaagggagcggcaccggggctcgtcacgaactggctaacgggaaaggagagagcgtggaggaccgcaacaagtgggcagtgctcacgctgtatgaggccctgaacgcgcgggacgtggagcgggtgcagcagctgctggcccccgacatcgagtggtggttccatggcccgccggagcaccagcacatgatgcgcatgctcaccggcgcggaggaggaggaaaccgcagccgccttcaggttccagcccgagcgagtcgccgccttcggctccaccgtcgtcgccgagggcagagcccccaacgccgcctgggtccacgcctggaccgtcgcccccgatgggataatcacccaggtccgcgagtacttcaacacctccctcaccatcacccgagtcgccgcctcttcggcttcctccaaggaacccgcaggctcgacacactgccttcacctgtggcagagccgccgccccgtccctcccgaaaaatccttccccggcctcgtcctggccatctaagccactacaaacaatcctaagccgtaagcctaatcattctaaataaagaggggtgggtgaaagttccatgggctgagagggaaccctcactccccgttgttgggatctgagtctgtagctg

SEQ ID NO: 104 - protein, 109 aa, Musa acuminata
MMRMLTGAEEEETAAAFRFQPERVAAFGSTVVAEGRAPNAAWVHAWTVAPDGIITQVREYFNTSLTITRVAASSASSKEPAGSTHCLHLWQSRRPVPPEKSFPGLVLAI

SEQ ID NO: 105 - DNA, 993 bp, Mesembryanthemum crystallinum
gattcggcacgagcaaatttcatccctcaagaatggctaaccaccagagagaaccagttagcgctggaggaaaacgaaggagaagcagccaacaaaggggtggtgctcgccctttatgacgccctaaactcccgtgactctaacaaggtctcatctctcctcacccccgacctcgagtggtggttccatggtcccccgtcccaccagtttctgatgctcttgctcaccggtgctgatttgtccccatcatctttccaattcaacccccagtcgatcgtggcctttggatctctggtcctcgccgagggctgcgatcccacccgctcgatctcctgggtccacgcctggaccgtcacggatgggataattactcaggtcagggagtacttcaacacctccgttaccgttactcgtctcggtgctggtaacaacaacactcaatctcagccgtccgatcagattgttccggctgctgctcactcttctcatctccaccattgtcagcccgtttgggagagcagtctcgctaatcgggccgggaaatctgtcccgggcctcattgttgctctctgatcgaatccggcccggtggcgatttgtctttggccaattaggtggtcacacgtcgtcaggtatgggctgaggtggaaaaaaaatactccgtagtagtaactccataattataagataagtgtttgggaatttgtggtgctctgttttcgaagatgtaagctctgcttcaaggtgggtggcgttttggcttccaagtggtttatattttttttttttttgtttatttttactgttttaggctctaaagcttaaagccttaaaggtgtgtttggtttggagtgcttgtgtgtttggtaaagtatttgatgaagaagtggagagggtgttatcacaattgggttcctaattgtaatagtggtaatgaaaattgttatggactacctagtcttttctggcattaaaaaaaaaaaaaaaaaaaaaa

SEQ ID NO: 106 - protein, 119 aa, Mesembryanthemum crystallinum
MLLLTGADLSPSSFQFNPQSIVAFGSLVLAEGCDPTRSISWVHAWTVTDGIITQVREYFNTSVTVTRLGAGNNNTQSQPSDQIVPAAAHSSHLHHCQPVWESSLANRAGKSVPGLIVAL

SEQ ID NO: 107 - DNA, 900 bp, Malus x domestica
  misc_feature (779)..(779): n is a, c, g, or t
cacaattccatctctctttccaaaacctccaccttctctctctaaaacccttactttcactctaaacccgccacagaggcctaggcaagaactggctaactctctggaagctctggaagacactgagtccagcaatcgaagggtggtgctcgccctttatgacgccctgagctcccgtgacgtcgacacggtgctcaagatcgtcgcccccgacctcgagtggtggttccatggtccgccgacccaccagttcttgatgcgcctcctcaccggctcccaaaacgaatcgtttcagttcgtcccccagtccatcgcctccttcggccccaccgtcctcgtcgagggctgcgaccgcgactgctccatttcctgggtccacgcctggaccgtcgccagtggtgtagtcaccggcgtccgcgagtacttcaacacttccctcacagtcacgcgcctcggaaacaacagccacagaaactctcccgcctcctccgctaaatcctcgtccgggttttcctacaaggcgtcgtcgtcggcggccgagattacctcgttccatttcccgtcggtttgggagagcagcgtctccaatcgggccgggaagtccatgccgggtctggtcctcgcaatctaaaagccataatcccctgcggtcctgtgcagtggagtctagtactactaaataagcgggagctgaggtgtcataacctcattcgctgcctagtgctcgttatgagctgaagtcctactgtactcttattcgctttttccttttaagttanattgtgtgtggtgctggtgttgggtgtaaccatggggtcgaggtccttttggtcatatccagacgcggctgtagtggtgttatggtactcttctatttcaataaagacgtgtttgcttaat

SEQ ID NO: 108 - protein, 124 aa, Malus x domestica
MRLLTGSQNESFQFVPQSIASFGPTVLVEGCDRDCSISWVHAWTVASGVVTGVREYFNTSLTVTRLGNNSHRNSPASSAKSSSGFSYKASSSAAEITSFHFPSVWESSVSNRAGKSMPGLVLAI

SEQ ID NO: 109 - DNA, 940 bp, Malus x domestica
gctctttctaaacttccgccttctctctctactttctctctctaaacccttgaatttctcgctctaaacccgccacagaggcttaggcaagaactggctaactctcaggaagctctggaagacactgattccagcaatcgaagggtggtgctcgccctttatgatgccctaagctcccgcgacgtggacacggttcaccagatcgtcgcccccgacctcgagtggtggttccatggtccgccgacccaccagttcttgatgcgcatcctcaccggctcccaaaaagaaccctttcagttcgtcccccagtccttcgcctccttcggccccaccgtcctcgtcgagggctgcgactgcgactgctccatttcctgggtccacgcctggactgtcgccaatggggtaatcaccggggtccgcgagtacttcaacacttccctcaccgtcacgcgcctcggaaacaacacccagaacaactctcccgcctcctcctctaaatcctcgccgtccgggttttcctccaattcgtcgtcgtcgtcgacagccgagattacgtcgttccattgcccgtccgtttgggagagcagcgtctccaatcgggtcggaaagtccgtgccgggtcttgtcctcgcaatctaaaagccataacactaatcccctgcggtcctgtgcagtggagtctaatactactaaataagcgggggctgaggtgtcataacctcattggctgtccggtactcgttatgggctgaactgccgaagtcctatcctaccgtatttctttctcgctttttcatttctctttcttttcttgaaatttcgtttgtgtgtggtgctggtgttgggtgtaaccatggggtcgaggctcttttggtcatatcccgacgcggctgtagccgtgttatggtactcttctatttcaataaagacgtgttttctt

SEQ ID NO: 110 - protein, 126 aa, Malus x domestica
MRILTGSQKEPFQFVPQSFASFGPTVLVEGCDCDCSISWVHAWTVANGVITGVREYFNTSLTVTRLGNNTQNNSPASSSKSSPSGFSSNSSSSSTAEITSFHCPSVWESSVSNRVGKSVPGLVLAI

SEQ ID NO: 111 - DNA, 797 bp, Manihot esculenta
  misc_feature (732)..(733): n is a, c, g, or t
  misc_feature (755)..(756): n is a, c, g, or t
gttcttcatacacatttctctctcttccttgaactctccgctttttctctctctctctctctctctctctctctcttagcttcagtgtaaaagggccgattccgggcttattctcgaactggctaactcacaggaaatactggaagaatcgtcaagaaagaaccaagaggtggttcttgacctctatgaggccttgagatctcgagacgtggacacggtgcaaaagatcctcgcctccgacctcgagtggtggttccatggcccgccgtctcaccagtttatgatgcgccttctcactggtactgacaccgcatcgtcatcatcaggaaaagttggaaaaagctccactgattttgagttcaaccctgtgttcatcagggcctttggatcgatcgtgattgttgaaggctgtgattatagccgctccatttcttggattcacgcgtggactgttacggatgggataattactcaggtgagagagtacttcaacacttctcttactgttactcgtcttggaaaccaagatcaatcagagccatctgattattcatctccgtcttcatcgtcatcttcatctgcggagataacttctgtgcattgcccgtacatttgggagagcaggctcaccaatcgggtcgggaaatcagtgccgggtttggttctggcaatttaatcaataagtgttctgatcaggtgcaggcgttattattataatatagtagtggaatnnaaaaaacgccgcacgtgtctcnnttatgcgaacagagatgtgagtctttaagggcttgtttgtt

SEQ ID NO: 112 - protein, 131 aa, Manihot esculenta
MMRLLTGTDTASSSSGKVGKSSTDFEFNPVFIRAFGSIVIVEGCDYSRSISWIHAWTVTDGIITQVREYFNTSLTVTRLGNQDQSEPSDYSSPSSSSSSSAEITSVHCPYIWESRLTNRVGKSVPGLVLAI

SEQ ID NO: 113 - DNA, 662 bp, Mimulus guttatus
ttcttcttctcccacacttctctctcatattcaggaactggcggcgttaagtcaggaaattctggaggattctctaacgaaaggggtggtgaccgccctgtatgacgccttgaaccgccgcgactcggtggcaatccagcagatcctcgccccggacctcgagtggtggttccacggcccccctacccaccaatttttgatgcgcctcctcaccggcgtccaggaatccaacttccgcttcctcccccacagcatctccgccttcggccccaccgtcctcgccgagggtttcgaccagtcacgctccattgcctgggtccacgcctggaccgtctcccccgatgggataatcacccagctccgtgagtacctcaacacttccctcaccgtcacccgaatcggtaactccgattgcaccaccaccaccaccaccaccaccggcgttgtgtccctgcattgcccctctgtttgggagagtagcctccccgatcgggtcggcaaatccatgccgggtctcgtgcttgtcatttaaaaagatttccattctatcccttcggccacgggctttgtaagtccatttatctatcataaccaaacctatcccccacacctattgcacccaacgatcatagactgcgcgataaaccccgtatccgttccta

SEQ ID NO: 114 - protein, 110 aa, Mimulus guttatus
MRLLTGVQESNFRFLPHSISAFGPTVLAEGFDQSRSIAWVHAWTVSPDGIITQLREYLNTSLTVTRIGNSDCTTTTTTTTGVVSLHCPSVWESSLPDRVGKSMPGLVLVI

SEQ ID NO: 115 - DNA, 893 bp, Medicago sativa
ggggatcatttacaacattccattcacccaatccaaaatcccaaactcagaaatttctagaaaaccactttttttctcgatctggctaactctcaggttaataccgaagacactgattccagcaatcaaaagctggttctcacactatatgactccctaaactctcgagactccgacaccgtggttcgaatcctcgcccctgacctcgagtggtggtttcacggtccaccctctcatcagtttttgatgcgcacgctcactggcgacaccaccgccgtcgataccttccgttttgttcctcagtccataatctccttcggcccaaccgttatcgttgaaggctgcgatacttcacgcgctatttcctgggttcacgcgctgactgttgtggatgggatagttactcaagttagggagtatttcaacacttcccttaccgtcacacacttcgccgggaaagactccggtgagattgtgccggcggccaattccggtggttttacttgtgtttgggaaagtagcgtttctaatcgggtcggtaaatccgtacccggtttggtcctcgctatataaaattattattattaattattaaaataaaataagtgtgctgtgcacgtggcagacggtgattggcttggtatcacttttttcacgggacgtgactttcggtgtttgtttccgtaggagatgtgagaccgcgttgctgtcggtgtcgtgttcaatattgtggtgttttttttcttcccgtttgtttggtttttcttcctagtttgtttggttgtttagtttgatttcttgtgtggaaccattattattatgggtgtgtctcgttggtttgtaatatcgtatttaaatgatgaaataataagaagatcaatgaatcttttttc

SEQ ID NO: 116 - protein, 108 aa, Medicago sativa
MRTLTGDTTAVDTFRFVPQSIISFGPTVIVEGCDTSRAISWVHALTVVDGIVTQVREYFNTSLTVTHFAGKDSGEIVPAANSGGFTCVWESSVSNRVGKSVPGLVLAI

SEQ ID NO: 117 - DNA, 324 bp, Medicago truncatula
atgcgcacactcactggcgataccaccgccgttgataccttccgttttgttcctcagtccgtcatctctttcggctccaccgttattgttgaaggctgcgatacctcacgcgctatttcctgggttcacgcgctgactgttgtggatgggatagtcactcaggttagggagtatttcaacacttcccttaccgtcacacacttcgccgggaaagactccggtgagattgtgccggctaatcccggtggttttcattgtgtttgggaaagtagcgtttctgatcgggtcggtaaatccgtacccggtttggtcctcgcaatataa

SEQ ID NO: 118 - protein, 107 aa, Medicago truncatula
MRTLTGDTTAVDTFRFVPQSVISFGSTVIVEGCDTSRAISWVHALTVVDGIVTQVREYFNTSLTVTHFAGKDSGEIVPANPGGFHCVWESSVSDRVGKSVPGLVLAI

SEQ ID NO: 119 - DNA, 462 bp, Medicago truncatula
atgcctatagagcaagaggatcacaacaagaaattagtaactgatttatacaaagccctaatctccaaagacacaaacacaatgcaacatcttcttgcctcagatttggaatggtggttccatggtccaccatgtcatcgtcactatttggtccctatcctcacaggctcatcatcatcatcatcaatatctcaagaatctttagttcctaatcttataattgggtttggatcagtgattgttgctgaaggctatgatgaaaaaaatatggtatggtgggttcatgcatggtctatttctgatggaattatcactgaggttagagaatatgttaacacttcggtttatgttactaagcttggtttgcattcagaagatgttgttgttggttccagttgtaggtgcatttggcagagtaagctttgtgatggttcggttcctggactcattctcacaatctag

SEQ ID NO: 120 - protein, 153 aa, Medicago truncatula
MPIEQEDHNKKLVTDLYKALISKDTNTMQHLLASDLEWWFHGPPCHRHYLVPILTGSSSSSSISQESLVPNLIIGFGSVIVAEGYDEKNMVWWVHAWSISDGIITEVREYVNTSVYVTKLGLHSEDVVVGSSCRCIWQSKLCDGSVPGLILTI

SEQ ID NO: 121 - DNA, 761 bp, Nicotiana tabacum
ggtccggattcccgggatgacaatctttcttgattatttttctctattattccttattataactgaactggctaacactcaggaaactctggaggaaactcaaaacaaaagggtggtagtagccctatatgaagccttgagctcacacgacgtcgttcaggtccagaacctactggccgcggacctcgagtggtggttccatggtccaccttctcatcagttcttgatgcaaaccctcaccggcactgccaaggacgctttccacttcatccctaagagcattgacgtcttcgggtccattgtactcgtcgaaggctgcgacccgacccgctccattacttgggtccacgcctggactgtggctgatggggtaattacccaggttcgggagtacttcaacacctcgcttattgtgacccgttttgggaagaaaacccaatcggattttgaatctataacgcccctgcattgcccctctgtttgggagagtagcctcgctaatcgggtcgggaaatccgttccgggtctagtcctggctctctagataaaagtgcagtttgtgcttggttctagtatgggctgaagttcttttgctgtttggtttggctttctattttggttttaattttgtttaagtttatttgttgttgtggtcgagttaaccaatgatgattgggagtgggagacccttctacttggtctgtttggtttgcaataaaagtgattttctttggttggttacataacaaaaaaataaaaag

SEQ ID NO: 122 - protein, 175 aa, Nicotiana tabacum
MTIFLDYFSLLFLIITELANTQETLEETQNKRVVVALYEALSSHDVVQVQNLLAADLEWWFHGPPSHQFLMQTLTGTAKDAFHFIPKSIDVFGSIVLVEGCDPTRSITWVHAWTVADGVITQVREYFNTSLIVTRFGKKTQSDFESITPLHCPSVWESSLANRVGKSVPGLVLAL

SEQ ID NO: 123 - DNA, 813 bp, Nicotiana tabacum
catcttatcactacctaattctcagaatctcctcttctcctgtaaaattatacttatattctctcctcttttttcggaactggctaactctcaagaaactctggaagaaactagaaacaaaggggtggtgttcgccctatatgaagccttgagctcacgtgacgttgacaaggtccagaaacttctggcctctgatcttgagtggtggttccatggcccaccttcccaccagtttttgatgcgcatcctcactggcactgccaagtcggacaccgaccttttccagttcattcctcagaccattgacgcctttgggtccactgtactcgttgaaggctgcgatcctgaccgttcaattacttgggttcacgcttggaccgtcactgatgggataattactcaggttagagagtatttcaacacctctcttaccgtcacccgactcggtaacaatactacggatttttcctctattaccccccgccattgtccctctctttgggagagtagtcttcccaaccgggtcggtaagtcggttccgggtctcgtcctggccctttgatttgcttatgggctgaagttcaaggagttatatcttgtgtccgcgaggatgtaagtttaacggctagtttgggggtttccgtcaccgtttgatttgccttgttttatttttatctgcaattttaatttgttagaaagtagtagtgtgctagtggagttaagggaccatgataaatgggagacccttgtattggttatggtgttttgatgaaatatctagtatggcgtgtttggtttgcaataaaagcactt

SEQ ID NO: 124 - protein, 107 aa, Nicotiana tabacum
MRILTGTAKSDTDLFQFIPQTIDAFGSTVLVEGCDPDRSITWVHAWTVTDGIITQVREYFNTSLTVTRLGNNTTDFSSITPRHCPSLWESSLPNRVGKSVPGLVLAL

SEQ ID NO: 125 - DNA, 733 bp, Ocimum basilicum
gcacgaggtttcatcttcataataatatctgttttttttactgaactggctaactctcagttaactctggaggaaacaacaaacaaaggggtggtgctcgccctgtatgaagccttgagctcacacgacgtcgttcaggtccagaaactcctggcctccgaccttgagtggtggttccatggtcctccttctcatcaatttttgatgcaaatactcaccggtactgctaaattcgataacgcctcttttcaatttcttcataaaaccattgacgtattcggctccgtggttctcgtggaaggctgtgacccgacccgatctattacttgggttcacgcctggactgttacggatggggtaattacccaggttagggagtatttcaatacctcacttactgtcacccgttttcggaagaaaaaccaatccgatatttcctctattacgcctctgcattgtccctctgtttgggagagtagcttacctaatcgggtcgggaaatctgttccgggtcttgtattggctctataagaaaattgtgctgccgtttgtcttgtgtctgataggatgtaagattaacacggctggtttgagattctgttgccgtttggtttgattttttatttttttttaagttgggatttgtgtttgtttaattatgattgagttaaagaaggggccaatgaaaagtggatatacctttcgattgttgcctaattatgtaatggtttgc

SEQ ID NO: 126 - protein, 108 aa, Ocimum basilicum
MQILTGTAKFDNASFQFLHKTIDVFGSVVLVEGCDPTRSITWVHAWTVTDGVITQVREYFNTSLTVTRFRKKNQSDISSITPLHCPSVWESSLPNRVGKSVPGLVLAL

SEQ ID NO: 127 - DNA, 907 bp, Prunus armeniaca
catttctgtgttgagaaagctgcccgggtgcttaggctagaactggctaactctcaggaaactctggaagacagtgattccagtaataaaagggtggtgctcgccctctatgaagccctgagctcgcgtgacgtacacaaagtgcaccagattgtagctccggacatcgagtggtggttccatggtccgccgacccaccagttcttgatgcgcctcctcaccggcgaccaaaacgaatcgtttcagttcagtccccagtccttcgcctgcttcgggcccaccgtcctcgtcgaaggctgcgaccgagattgctccatctcctgggtccacgcctggaccgtcactcatgggatagtcacccaggtcagggagtacttcaacacttccctcaccgtaacccgcctcggtaacaacacctctccctcttcctccgctcaatcctcgccgtccagcttctcttccaagtcctcctcatcgacggccgagattacctcgttccattgcccgtccgtttgggagagcagcgtctccgatcgggtcgggaagtccgtgccgggtctggtcctcgcaatctaaagaccacaataatcccctgcgggcccctgtgcagcgggattctacttttggtatttacttaaataagagggtgctgacgtgtaggcaccttatgggctgaatctactgcgaagttgtggtgtcgtagtagaaatgtaagccccttgctaggtgttgtttggtttgtttgtggttgtttttgcattttagtttgtttttggttgtttgtgtttctggttgtggtgttgggtggagccaatggggttgaggaaactcttttggtcatatcctgaagcgtctgtagaattatggtactctcctttttcaataaagacgtgtttgtttaatatcc

SEQ ID NO: 128 - protein, 122 aa, Prunus armeniaca
MRLLTGDQNESFQFSPQSFACFGPTVLVEGCDRDCSISWVHAWTVTHGIVTQVREYFNTSLTVTRLGNNTSPSSSAQSSPSSFSSKSSSSTAEITSFHCPSVWESSVSDRVGKSVPGLVLAI

SEQ ID NO: 129 - DNA, 666 bp, Populus x canadensis
ggcacgaggcctcgtgccgaattcggcacgaggctcctaagcaagactacccccgtccttcttctttatcagctgcattcagcgctttcccaagaactggctaactcacaagaagttctggcagaaatcactgcaccaaagctaccagcatcaacaaaagagaaccaagacgtggttcttgctttctatgaagccttaaagtcacgtgacgtggacacggtacacaagatcctagcacacgaccttgagtggtggttccatggcccgccgtctcaccagtttatgatgcgccttcttactggtgaacaaaaagacaacgacgtgccgtttggcttctcccctatctccatcacctcttttggaaaccttgtggttgttgaagggtgtaatacaagtcgttccatttcctgggtgcacgcttggactgttacggatgggataattacccaggttagagagtacttcaatacttctcttactgttactcgtcttggaaatcaatcacaaccgtctgattttaagtcaaagtcaaattcatcatcaacgcccgagatatccctgttgcattgcccatccatctgggagagcaccctatccaatcgggccggtaagtccgtgccgggtttggttctggctatttgagcggactttgttcaggtgcatccg

SEQ ID NO: 130 - protein, 119 aa, Populus x canadensis
MMRLLTGEQKDNDVPFGFSPISITSFGNLVVVEGCNTSRSISWVHAWTVTDGIITQVREYFNTSLTVTRLGNQSQPSDFKSKSNSSSTPEISLLHCPSIWESTLSNRAGKSVPGLVLAI

SEQ ID NO: 131 - DNA, 926 bp, Populus deltoides
tagtggatcaaagaattcggcacgaggcctcgtgccgaattcggcacgagggtttctcctaagcaaaactaccccccgtccttcttctttatcagctgcattcagcgctttcccaagaactggctaactcacaagaagttctggcagaaatcactgcaccaaagctaccagcatcaacaaaagagaaccaagacgtggttcttgctttctatgaagccttaaagtcacgtgacgtggacacggtacacaagatcctagcacacgaccttgagtggtggttccatggcccgccgtctcaccagtttatgatgcgccttcttactggtgaacaaaaagacaacgacgtgccgtttggcttctcccctatctccatcacctcttttggaaaccttgtggttgttgaagggtgtaatacaagtcgttccatttcctgggtgcacgcttggactgttacggatgggataattacccaggttagagagtacttcaatacttctcttactgttactcgtcttggaaatcaatcacaaccgtctgattttaagtcaaagtcaaattcatcatcaacgcccgagatatccctgttgcattgcccatccatctgggagagcaccctatccaatcgggccggtaagtccgtgccgggtttggttctggctatttgagcggactttgttcaggtgcatccgggagtattgtaatatacatgtagtttggaataaatagggtgcacacgtgtgtgttttgtgtgtcaagagagatgtgagtctcttaggtcttgtttggtttggtttggattgttgaagttgtgtgtgtgaaaatagtaggagtcggcctagatggggagacctatttggttaacactacatttccctgtaatttggtattttaattgtgcaataaagatgtggtactgcgattttctt

SEQ ID NO: 132 - protein, 119 aa, Populus deltoides; identical to SEQ ID NO: 130

SEQ ID NO: 133 - DNA, 632 bp, Populus euphratica
tttctctctggtagctgtttcttctaagcaaaactacccccgtcctcctcctttatcagctgcattcagcgctttcccaagaactggctaactcacaagaagttctggcagaaatcactgcaccaaagctaccaacatcgacaaaaaagaaccaagacgtggttcttgctttctatgaagccttaaagtcacgtgacgtggacacggtacacaagatcctagccaacgatcttgagtggtggttccatggcccgccgtctcaccagtttatgatgcgccttcttactggtgaaaaaaaagacaacgacgtgccgtttgaattctcccctatctccatcacctcttttgggaaccttgtggttgttgaagggtgtaatacaagccgttccatttcctgggtgcacgcttggactgttaccgatgggataattacccaggttagagagtacttcaatacttctcttactgttactcgtcttggaaatcaatcacaaccgtcagattttaagacaaattcatcatcaacgggcgagatatctctgttgcattgcccatccatctgggagagcaccctatccaatcgggtcggaaagtccgtgccgggtttggttctggctatttgagcggactct

SEQ ID NO: 134 - protein, 117 aa, Populus euphratica
MMRLLTGEKKDNDVPFEFSPISITSFGNLVVVEGCNTSRSISWVHAWTVTDGIITQVREYFNTSLTVTRLGNQSQPSDFKTNSSSTGEISLLHCPSIWESTLSNRVGKSVPGLVLAI

SEQ ID NO: 135 - DNA, 726 bp, Panax ginseng
ggccattacggccggggaccattcacctctccttcttaattactctctctctctctctaaaaacgtgaaaagtttgatttgcgccagaactggctaactatcaggaagctctggaggaaaccaaaaaccaaagggtggtactcgccctctatgaagcgctgaccgctcgtgacgtcatcaccgtccacaagctccttgcctccgatctcgagtggtggttccatggcccgccgtcccaccagtttatgatgcgccttctcaccggcactgacacattatcaaccgaatcgttcgaattttccccacaatccgttaccgcattcggaccaacggtcctcgtcgagggctgcgatcaaggccgttcaatctcctggattcacgcctggaccgtaactgatgggataattacccaggtccgggagtatttcaacacttccctcaccgttacccgtttcggaaacgggtcggacttctcgtcttcagttacctctctcaattgcccttctgtttgggagagcagtctgtcggatcttggtggaaaatcagtgccgggtcttgttcttgcgatataaggacttgatctggtgcggccgtaagtaaaatagtatcgtgctattgaataaagaatccaatccttttgcgaatgggctgaagtgccgtagtatcttgtgtctgggaggatataagattaacggttctgattcatttctctcaatttggtgtcgt

SEQ ID NO: 136 - protein, 108 aa, Panax ginseng
MMRLLTGTDTLSTESFEFSPQSVTAFGPTVLVEGCDQGRSISWIHAWTVTDGIITQVREYFNTSLTVTRFGNGSDFSSSVTSLNCPSVWESSLSDLGGKSVPGLVLAI

SEQ ID NO: 137 - DNA, 561 bp, Petunia hybrida
catttttagcatattcatcctctttctttcacaactggctaactcttatcaaactcctactctggaagaaacaacaaacaaaggggtggtgctcgccctatatgaagccttgagctcaaacaacgtagctctggtccaaacccttctgaaccccgacctcgagtggtggttccatggtcctccttcccaccaatatttaatgcacatcctcaccggcaccgataaaaacactttccaattcattcctaccatcattgacgcttttggatccattgtacttgttgaagggtgtgacccgacccattccattacttgggtgcatgcatggactgttactgatggggtaattacgcaagttagagagtattttaacacttctcttactgttacccgttttggaaagtccggttttggaaagtcatctgttacacccttgcattgcccttctgttcgggaaagtagccttgctaatcgggtcgggaaatctgttccgggtcttgtattggctttgtaaaccgggtctgtgtttgacccggtttgttactgcgtggcccccgtgta

SEQ ID NO: 138 - protein, 104 aa, Petunia hybrida
MHILTGTDKNTFQFIPTIIDAFGSIVLVEGCDPTHSITWVHAWTVTDGVITQVREYFNTSLTVTRFGKSGFGKSSVTPLHCPSVRESSLANRVGKSVPGLVLAL

SEQ ID NO: 139 - DNA, 684 bp, Petunia hybrida
  misc_feature (611)..(611): n is a, c, g, or t
ataatttctctcaattataagttatttattcattattccggaactggctaactctagagaaaatactctggaagaaattactagcaacaaaggggtggtgctcgccctatatgaagccttgagctcacgtgacgtgaacaaggttcagaaactactagccactgacctcgagtggtggttccatggtccaccttcccaccaatttttaatgcgcatccttacgggcttggccaaagcggacaacgactttttcgagtttattcctcaaactattgacgtgtcctttggatctattgtactcgttgaagggtgtgatcctgaccgttcgattacttgggttcatgcttggactgttactgatgggataattactcaagttagggagtacttcaacacttctcttaccgttactcggcttacggacttttcctctattgcccccagcacacgacattgtccttctgtttgggaaagtagcctcgctaatcgggttggtaaatcggttccaggtcttgtccttgctctttaaaatctccgaggatgtaagtttaaagacggtttggttaggttaggtttttattttagtctgcaattttatttggtactagtanttgagctgtttaagaagggaccatgatgtatgggagacctttgtactggtttgacaaagtatgtagtaagtag

SEQ ID NO: 140 - protein, 106 aa, Petunia hybrida
MRILTGLAKADNDFFEFIPQTIDVSFGSIVLVEGCDPDRSITWVHAWTVTDGIITQVREYFNTSLTVTRLTDFSSIAPSTRHCPSVWESSLANRVGKSVPGLVLAL

SEQ ID NO: 141 - DNA, 478 bp, Prosopis juliflora
  misc_feature (454)..(454): n is a, c, g, or t
gccttaagctcgggagactccgacaccgttgtcaagctcgtcgcacctgatctagagtggtggttccatggtcctccgtccgaccagtatttgatgcgcatgctcaccggtgaacactcgtcggatactttccggtttgttccccaatcgatcgcctcctttgggccaatcgccatcgtcaagggctgcgaccacagccgcccgatctcgtggattcacgcctgcaccgtcactgatggggtaatcacccaaatcagggagtacttcaacacttccctcaccgttacccgcatcggagattccagctcgtctccgacgtcggagatcactgccgttgcggacgcgcttccttcctgcgtgtgggaaagcagcctctcgcaccgggtcggaaaatccgtgccggggctcgtcctggcgatttaaatacgcgtgacagtacgtgcagcatattaanattcatataataataaaggactgc

SEQ ID NO: 142 - protein, 109 aa, Prosopis juliflora
MRMLTGEHSSDTFRFVPQSIASFGPIAIVKGCDHSRPISWIHACTVTDGVITQIREYFNTSLTVTRIGDSSSSPTSEITAVADALPSCVWESSLSHRVGKSVPGLVLAI

SEQ ID NO: 143 - DNA, 546 bp, Prunus persica
cagtaatagaagggtggtgctcgccctctatgaagccctgagctcgcgtgacgtacgcacagtgcaccagattgtagctccggacatcgagtggtggttccatggtccgccgacccaccagttcttgatgcgcctcctcaccggcgaccaaaacgaatcgtttcaattcagtccccagtccatcgattgttttttgcccaccgtcctcgtcgagggctgcgaccgagattgctccatctcgtgggtccacgcttggaccgtcactcatgggatagtcacccaggtcagggagtacttcaacacttccctcaccgtaacccgcctcggtaaaaatacctctccctcttccttcgctcaatcctcgccgtccagcttcttttccaagtcctcctcatcgacggccgagattacctttttccattgcccgtccgtttgggagagcatcgtcttcgatcggctcgggaattccgtgcccggttttggttcttcaatataaacaccacaattttcctttctcgtccccccgttcccctcggcctccttatt

SEQ ID NO: 144 - protein, 122 aa, Prunus persica
MRLLTGDQNESFQFSPQSIDCFLPTVLVEGCDRDCSISWVHAWTVTHGIVTQVREYFNTSLTVTRLGKNTSPSSFAQSSPSSFFSKSSSSTAEITFFHCPSVWESIVFDRLGNSVPGFGSSI

SEQ ID NO: 145 - DNA, 602 bp, Populus trichocarpa
gtacagtcaaagctttccaagaactggctaactcacaagaaattctggcagaaatcactgaaccaaagccaccaacatcatcaagaaagaaccaagaagtggttcttgctttctatgaagccttaaagtcacgtgacgtggacacggtacacaagatcctagcccacgatcttgaatggtggttccatggcccgccgtctcaccagtttctgatgcgccttctcactggtgaacaaaaagacaacgacgtgccgttcgagttctcgcctctttccatcacctctttcggaaacattgtggttgttgaagggtgtgataccagtcgttccatttcttgggtgcacgcttggactgttacggatggggtaattacccaggttagagagtacttcaatacctctcttactgttactcgtcttggaaaccaatcacagtcgtctgattttaagtccaagtcaaagtcatcatcaacgactgagatttctcctgtgcattgcccatccgtctgggagagtagtctctccgaccggatcggtaagtccgttccgggtttggttctggctatttgagtggactctgatcaggtgcatccggaagtattg

SEQ ID NO: 146 - protein, 118 aa, Populus trichocarpa
MRLLTGEQKDNDVPFEFSPLSITSFGNIVVVEGCDTSRSISWVHAWTVTDGVITQVREYFNTSLTVTRLGNQSQSSDFKSKSKSSSTTEISPVHCPSVWESSLSDRIGKSVPGLVLAI

SEQ ID NO: 147 - DNA, 930 bp, Populus trichocarpa
ccccgtggcctccctgacaaactcaatcggttatcttttctctctggtagctgtttctcctaagcaaaactacccccgtccttcttctttatcagctgcattcagcgctttcccaagaactggctaactcacaagaagttctggcagaaatcactgcaccaaagctaccagcatcaacaaaagagaaccaagacgtggttcttgctttctatgaagccttaaagtcacgtgacgtggacacggtgcacaagatcctagcacacgaccttgagtggtggttccatggcccgccgtctcaccagtttatgatgcgccttcttactggtgaacaaaaagacaacgacgtgccgtttgacttctcccctatctccatcacctcttttggaaaccttgtggttgttgaagggtgtaatacaagtcgttccatttcctgggtgcacgcttggactgttacggatgggataattacccaggttagagagtacttcaatacttctcttactgttactcgtcttggaaaccaatcacaaccgtctgattttaagtcaaagtcaaattcatcatcaacgcccgaaatatctctgttgcattgcccatccatctgggagagcaccctatccaatcgggtcggtaagtccgtgccgggtttggttctggctatttgagcggactttgttcaggtgcatccgggagtattgtaatatacatgtagtttggaataaatagggtgcacacgtgtgtgttttgtgtgtcaagagagatgtgagtctcttaggtcttgtttggtttggattggtttggtttggattgttgaagttgtgtgtgtgtgaaaacagtaggagtcggcctagatggggagacctatttggttaacactacatttccctgtaatttggtattttaattgtgcaataaagatgtggtactgcg

SEQ ID NO: 148 - protein, 119 aa, Populus trichocarpa
MMRLLTGEQKDNDVPFDFSPISITSFGNLVVVEGCNTSRSISWVHAWTVTDGIITQVREYFNTSLTVTRLGNQSQPSDFKSKSNSSSTPEISLLHCPSIWESTLSNRVGKSVPGLVLAI

SEQ ID NO: 149 - DNA, 1016 bp, Poncirus trifoliata
caccagttctctctggtaacccttatccagaatcacaaaacaaattcatttcattttcagtttctctgtttttgttgtttccattttctaaggctatattccgtcaagaactggctaactctcagcagaaaaatccggaagattccgaaaacaagaaccagcgcgtggttcttgctctgtatgatgccttaaaatctcgagacgttgaaacggtacacaagatcctagccccggacctagagtggtggttccatggcccgccgacccaccagtttatgatgcaccttctcaccggcagcaccaccgcatcgtcagcatcgcaaagctccttcgtattcgttcctctctcgatcacatcgttcgggcccattgtcctcgccgagggctgtgatcatagccgtcaaatcagctgggtccacgcctggacggtcgctgatgggataattactcaagtcagagaatacttcaacacttcgcttaccgtcacccgcttcggtaaagacttgtctggtcaaagtcagaggaagaaatcaccaccctctgatttcccatcaacagcggagattaatccggtgcattgcccctccgtttgggagagcagcgtctccaaccgggacggtaaatctgtcccgggtttggttctcgctctctaagcaaaccaaaaaagggaccgagattgatcctgtgcagccgcgtgtagtataatattttactttatcatatataaataaaggctgcacgtgacgtgtgtcgcccgctgtttgggccgtcgcttggagatgtgagtgactgaggccctgggtgggggagtgctttgggttgttttcgcctttatttttgtgtctggctttccgggtttgtttgtttgtttgtatgtttgatatgttggtctttccgggtcggatcatgatgtgtgaacccgaactcggttggttgtatccagctgttgtttatgttgattggtgctttgattatcgaataaaaattggttattttaataaactttgttcttggcc

SEQ ID NO: 150 - protein, 125 aa, Poncirus trifoliata; identical to SEQ ID NO: 32

SEQ ID NO: 151 - DNA, 803 bp, Phaseolus vulgaris
  misc_feature (638)..(638): n is a, c, g, or t
  misc_feature (716)..(716): n is a, c, g, or t
  misc_feature (724)..(724): n is a, c, g, or t
  misc_feature (761)..(761): n is a, c, g, or t
  misc_feature (779)..(779): n is a, c, g, or t
  misc_feature (790)..(790): n is a, c, g, or t
  misc_feature (797)..(797): n is a, c, g, or t
aaacagacattgtttggttgctgccgattctcgaatcgttttattctccaccgaaccccaaacctctttctcgaactggctaactctcaggcaagtgcttcagacgctgattccagcaacaaacggctggtggtagcactgtatgacgccctaagatccggcgactccgccgccgtcgtcaagatcctcgccgccgacctcgagtggtggttccatggtccgccgtcccaccagtttttgatgcgcatgctcaccggcgattccaccgccgaaaccttccgattcgttccgcaatccgttgccgccttcggctccaccgtcatcgtcgagggctgcgacaccgcccgcaacattgcctgggttcacgcctggaccgtcgcggatgggataatcactcaggtgagagagtacttcaacactgccctcaccgtcacccgcttcgaagactccggcgagattgttcccgcgagctccggcgccggccgcttcccctgcgtgtgggagagcagcgtatcgggtcgggttgggaaatccgtgcccggtttggttctggcaatataaataatagcaataaaagataaaaataattaaaaccggtcacgtggttgccgttagtggaataattaaataaaagtggntgtgcacgtggcggtgactgggttactcgattgcagggaaaatgataattgctattgggggtttttccgaaataaaanactggtanaacccggttctggtgtggtggttggggggtccttcanttggtggttggtcaatgngggttccttcncggtttnggcacc

SEQ ID NO: 152 - protein, 106 aa, Phaseolus vulgaris
MRMLTGDSTAETFRFVPQSVAAFGSTVIVEGCDTARNIAWVHAWTVADGIITQVREYFNTALTVTRFEDSGEIVPASSGAGRFPCVWESSVSGRVGKSVPGLVLAI

SEQ ID NO: 153 - DNA, 768 bp, Phaseolus vulgaris
gaagaactcaatcactttacaacattccggagctggcaaactcgagttcacagaaagcatggctacacgatcaagaggatcgcaacaagaaaaccgtaacagacttatacaaagccataacctcaaaggacaccaacacaatgtaccgtcttctggccccagacttggagtggtggttccacggcccaccctcccaccgccaccacctcattcctctcctcactgccaccgccacctcctccccctccaagcctgtgctggttcctgaccacatcgttgggttcggatcagtgaccatcgctgaagggttcgacgagaccaacttggtgtggtgggtgcacgcgtggaccaccaccgccgacggcgtcatcacggaggttagggagtacgtcaacacctccgtcaccgtcaccaggctcggcttccatggctccgacgatgtggttgcttctgccatgtgtcaaagcgtctggcagagcacgctgtgcgatgagtctgttccaggactcattctcgccatctagtgaagtgaagttccaaaggcttggttggttggttggttggttgtgaagttcgctatatatctgtcagtgtagtgttgtgtgacttaggttgaatgaaaccatcttcctgctgttggttgtgccatctttcgttgttctgtgtttgtttagggtttgttgaaaacaatgtggcaggataaataaatgttatgttactaccgtatcatgttccagtttcatgccttttgaagtattactctctctc

SEQ ID NO: 154 - protein, 127 aa, Phaseolus vulgaris
MYRLLAPDLEWWFHGPPSHRHHLIPLLTATATSSPSKPVLVPDHIVGFGSVTIAEGFDETNLVWWVHAWTTTADGVITEVREYVNTSVTVTRLGFHGSDDVVASAMCQSVWQSTLCDESVPGLILAI

SEQ ID NO: 155 - DNA, 627 bp, Ricinus communis
atgtctcaaaacaacacaaattgtaaagttaaggcagccgattcgaggctttttcaagaactggctaactcacaggaaatactggaagaagaatcatcctcaagaaagaaccaacaggtggttcttgccctttatgacgccttgaagtctcgagacgtcgatactgttcacaagatccttgcttctgatattgaatggtggtttcatggcccgccctctcaccagtttatgatgcgactccttaccggtgctgacacatcatcattcaagaaaagcagcagctcttcgacttcttttgaattcaacccagaaatcattagggtatttggctccattgttattgctgaaggttgtgattacacgcgctctatttcttgggtgcatgcttggactgttactgatgggataatcactcaggtcagagagtattttaacacttccctcactgttactcgtcttggcaatcaatctgcgccctctgattattcatctgtggcatcatcgtcttcttcttcgtcgtcatcaccggcgacagagattgcttctgcgcattgcccgtccgtttgggagagtagcttctccaatcgggtcggaaagtcggttccgggtttggttcttgctatttag

SEQ ID NO: 156 - protein, 208 aa, Ricinus communis
MSQNNTNCKVKAADSRLFQELANSQEILEEESSSRKNQQVVLALYDALKSRDVDTVHKILASDIEWWFHGPPSHQFMMRLLTGADTSSFKKSSSSSTSFEFNPEIIRVFGSIVIAEGCDYTRSISWVHAWTVTDGIITQVREYFNTSLTVTRLGNQSAPSDYSSVASSSSSSSSSPATEIASAHCPSVWESSFSNRVGKSVPGLVLAI

SEQ ID NO: 157 - DNA, 615 bp, Ricinus communis
atgtttgaacttttaattgttgatcaaattgtcgcagccgattcgaggctttttcaagaactggctaattcacaggaaatactggaagaagaatcgtcttcaaggaagaaccaagaagtggttctttccctttatgaagccttaaagtctcgagacgtcgatactgttcacaagatccttgcttctgaccttgaatggtggtttcatggcccgccatctcatcagtttatgatgcgcctccttactggtgctgacacatcattatcaaaaattagcaaaaaaacctttgaattcaacccagaaatcattagggtttttggctccattgtcatagctgaagggtgtgattctactcgctctatttcttgggttcatgcttggaccgtgactgatgggataattactcaggttaaagagtacttcaacacttctctcaccgtcactcgccttggtcatcgagatcaatctgaaccgtctgattcttctccatcttcttcttcgtcgtcgtcgtcatcaacggccgagattacttctgtgcattgcccgtccgtttgggagagtagcctctccaatcgggtcggaaagtcggtgccgggtttggttcttgcaatctag

SEQ ID NO: 158 - protein, 204 aa, Ricinus communis
MFELLIVDQIVAADSRLFQELANSQEILEEESSSRKNQEVVLSLYEALKSRDVDTVHKILASDLEWWFHGPPSHQFMMRLLTGADTSLSKISKKTFEFNPEIIRVFGSIVIAEGCDSTRSISWVHAWTVTDGIITQVKEYFNTSLTVTRLGHRDQSEPSDSSPSSSSSSSSSTAEITSVHCPSVWESSLSNRVGKSVPGLVLAI

SEQ ID NO: 159 - DNA, 756 bp, Solanum habrochaites
gcacgaggctttcatcttcataataatatctgttttttttactgaactggctaactctcagttaactctggaggaaacaacaaacaaaggggtggtgctcgccctgtatgaagccttgagctcacacgacgtcgttcaggtccagaaactcctggcctccgaccttgagtggtggttccatggtcctccttctcatcaatttttgatgcaaatactcaccggtactgctaaattcgataacgcctcttttcaatttcttcataaaaccattgacgtattcggctccgtggttctcgtggaaggctgtgacccgacccgatctattacttgggttcacgcctggactgttacggatggggtaattacccaggttagggagtatttcaatccctcacttactgtcacccgttttcggaagaaaaaccaatccgatatttcctctattacgcctctgcattgtccctctgtttgggagagtagcttacctaatcgggtcgggaaatctgttccgggtcttgtattggctctataagaaaattgtgctgccgtttgtcttgtgtctgataggatgtaagattaacacggctggtttgagattctgttgccgtttggtttgattttttatttttttttaagttgggatttgtgtttgtttaattatgattgagttaaagaaggggccaatgataatgggatatacctttcgattgttgcctaattatgtaatgaatggaataaaagcattggatggcgttc

SEQ ID NO: 160 - protein, 108 aa, Solanum habrochaites
MQILTGTAKFDNASFQFLHKTIDVFGSVVLVEGCDPTRSITWVHAWTVTDGVITQVREYFNPSLTVTRFRKKNQSDISSITPLHCPSVWESSLPNRVGKSVPGLVLAL

SEQ ID NO: 161 - DNA, 767 bp, Solanum habrochaites
gcacgaggcctcgtgccgaattcggcacgagggtttggtatataattataacttcattctctcctctttttcaggaactggctaattctcaggaaattctggaagaaaccagaaataaaggggtggtgctcgccctatatgaagctttgagctcacgtgacgttgacaaggtccagaaacttctggcctctgaccttgagtggtggttccatggtccaccttcacatcaatttttgatgcgcatactaactggtactgccaactccgatcactatttcttcaaattcattcctcaaagtattgacgcctttggatctactgtccttgtcgaaggttgcgatcctgatcactctattacttgggttcacgcttggactgttaatgatgggataattactcaggttagggagtatttcaatacctctctcacagtcactcgacttgacaatagtaataataataattgcccttcatcggatttgtcttccattgctgctacacggcattgcccttctctttgggagagtagtttacctaatcgggtgggtaagtcggttccgggtcttgttctcgctctctgagtttcgcgaggatgtaagtttaacggttgatttgggggttttcgtcgcattgttttaattttattatctgcaatttaaatttgggaccatgatgaatgggatatccttgtactggatatggcgttttaatatattatgtgatacgcgatgtatttaaatggcaataaaaacacttgttggtttttg

SEQ ID NO: 162 - protein, 114 aa, Solanum habrochaites
MRILTGTANSDHYFFKFIPQSIDAFGSTVLVEGCDPDHSITWVHAWTVNDGIITQVREYFNTSLTVTRLDNSNNNNCPSSDLSSIAATRHCPSLWESSLPNRVGKSVPGLVLAL

SEQ ID NO: 163 - DNA, 774 bp, Saruma henryi
ggcgcaaacgttcccatctctttctttctcactatctgttctttttctgtttctctctctctttctttcgtttcttcttttaaaattaaggccagaactggctaaccaggaaggaagcagcagcctggaggaggatcaaaacaaaagggtggtccgcgccctttatgaagccttaagtgcaggcgacgttgaaacggtgcaccgcctcctcacccctgacatcgagtggtggttccatggcccaccctcctgccagcatatgatgcgattgctcaccggcgtctccgaatcagaccctttcgatttcgtacccgtctccgtccaagccttcggacccaccgtcctcgctgagggacgcgatccctcccgctccgcctcctgggttcacgcttggaccgtcacgaatggggtagtgacccaggtcagggagtacttcaacacgtccctcctcgttacccgcctcgaaaattctgcaactgcttcttcgtcctcgtcctcgtcctcgtcctcgtcgtttcattgcctcaatcaccctctgtgggagagctctctgttcgatagctccggcaaatccatgcccggtcttgtcctcgctatctgaaacattacagaccggaaatcaaccataacgtgcttatagtttcaagggtgttctagtaattaaaataaaatttgcgtccttgtaatgggttgaaggtttggtaataggggttttatttcgtttttagtcggtctttttccttctttttttcctctggtttgtcttgtgtttgt

SEQ ID NO: 164 - protein, 113 aa, Saruma henryi
MMRLLTGVSESDPFDFVPVSVQAFGPTVLAEGRDPSRSASWVHAWTVTNGVVTQVREYFNTSLLVTRLENSATASSSSSSSSSSSFHCLNHPLWESSLFDSSGKSMPGLVLAI

SEQ ID NO: 165 - DNA, 790 bp, Solanum lycopersicum
ggccattacgggccggggatagttcatcatacctaccttcactcatcttcataatagtatctgtttttgttttactgaactggctaactctcagttaactctggaggaaacaacaaacaaaggggtggtgctcgccctgtatgaagccttgagctcacacgacgtcgttcaggtccagaaactcctggcctccgaccttgagtggtggttccatggtcctccttctcatcaatttttgatgcaaatactcaccggtactgctaaattcgataacgcctcttttcaatttcttcataaaaccattgacgtattcggctccgtggttctcgtggaaggctgtgacccgacccgatctattacttgggttcacgcctggactgttacggatggggtaattacccaggttagggagtatttcaatacctcacttactgtaacccgttttcggaagaaaaaccaatccgatatttcctctattacgcctctgcattgtccctctgtttgggagagtagcttacctaatcgggtcggtaaatctgttccgggtcttgtattggctctataagaaaattgtgctgccgtttctcttgtgtctgataggatgtaagattaacacggctggtttgagattctgttgccgtttggtttgatttttttgttaagttgggatttgtgtttgtttaattatgattgagttaaggaaggggccaatgataattgggtataccttccgattgttgtctaattatgtaatggtttgcaataaaaagctttgtgattggctgtttac

SEQ ID NO: 166 - protein, 108 aa, Solanum lycopersicum; identical to SEQ ID NO: 126

SEQ ID NO: 167 - DNA, 734 bp, Solanum lycopersicum
atcacattaatagttttgtatataaatatctcctcaactggctaattctcaggaaattctggaagaaactagaaataaaggggtggtgctcgccctatatgaagctttgagctcacgtgacgttgacaaggtccagaaacttctggcctctgaccttgagtggtggttccatggtccaccttcacatcaatttttgatgcgcatactaactggtactgccaactccgatcactatttcttcaaattcattcctcaaagtgttgacgcctttggatctactgtccttgtcgaaggttgcgatcctgatcactcaattacttgggttcacgcttggactgttgatgatgggataattactcaggttagggagtatttcaatacctctctcacagtcactcgacttgacaatagtaataataataataattgcccttcatcggatttgtcttccattgctgctacacggcattgcccttctctttgggagagtagtttacctaatcgggtgggtaagtcggttccgggtcttgttctcgctctctgagttccgccaggatgtaagtttttaacggttgatttgggggttttcgtcgcattgttttgattttattatctgcaattttaatttgggaccatgaggaatgggatatccttgtactggttatggtgttttaatatattatgtgatacgcgatgtatttggtttgcaataaaagcacttgttggtttttttg

SEQ ID NO: 168 - protein, 115 aa, Solanum lycopersicum
MRILTGTANSDHYFFKFIPQSVDAFGSTVLVEGCDPDHSITWVHAWTVDDGIITQVREYFNTSLTVTRLDNSNNNNNCPSSDLSSIAATRHCPSLWESSLPNRVGKSVPGLVLAL

SEQ ID NO: 169 - DNA, 503 bp, Solanum pennellii
actgcactggctaactctcagttaactctggaggaaacaaccaacaaaggggtggtgctcgccctgtatgaagccttgagctcacacgacgtcgttcaggtccagaaactcctggcccccgaccttgagtggtggttccatggtcctccttctcatcaatttttgatgcaaatactcaccggtactgctaaattcgataacgcctcttttcaatttcttcctaaaaccattgacgtattcggctccgtggttctcgtggaaggctgtgacccgacccgatctattacttgggttcacgcctggactgttacggatggggtaattacccaggttagggagtatttcaatacctcacttactggcacccgttttcggaagaaaacccaatccgatatttcctctattacgcctctgcattgtccctctgtttgggagagtagcttacctaatcgggtcgggaaatctgttccgggtcttgtattggctctataagaaaattggat

SEQ ID NO: 170 - protein, 108 aa, Solanum pennellii
MQILTGTAKFDNASFQFLPKTIDVFGSVVLVEGCDPTRSITWVHAWTVTDGVITQVREYFNTSLTGTRFRKKTQSDISSITPLHCPSVWESSLPNRVGKSVPGLVLAL

SEQ ID NO: 171 - DNA, 797 bp, Solanum tuberosum
cttctctcatcttcatagctaataatatcatcttctgttttactgaactggctaactctcagttaactctggaggaaacaacaaacaaaggggtggtgctcgccctatatgaagccttgagctcacacgacgtcgttcaggtccagaaactcctggcctccgacctcgagtggtggttccatggtcctccttctcatcaatttttgatgcaaatactcaccggcactgctaaattcgataacgcctcttttcaattccttcataagaccattgacgtattcggttccgttgttctcgttgaaggttgtgacccaacccgatctattacttgggttcacgcctggactgttacggatggggtaattacccaggttagggagtatttcaatacctcacttactgtcacccgttttgggaaatcggatatttcctcaattacgactctgcattgcccatctgtttgggagagtagcttacctaatcgggtcggaaaatctgttccgggtcttgtattggctctataagaaacgacccgatttgtgctggcgttgtatcttgtgtctagtaggatgtaagattaacgcggctggtttgggattctgttgctgtttggtttggtttgtttttattttttaagttgggatttgtgttctgtttattatttgttgttgtgattgagttaaagaaggggccaatgataattggatatacctttctactcaatagattgtctaattatgtgttggcttgcaataaaaagcatattgattggctgtttaaaaacaaaagaaaaactc

SEQ ID NO: 172 - protein, 105 aa, Solanum tuberosum; identical to SEQ ID NO: 84

SEQ ID NO: 173 - DNA, 759 bp, Solanum tuberosum
atcaggcagaggacgagacagaacgcagaaaattccaatctaatcaacatcccataaattattagttggtatataaatattctgttctctctggaactggctaattctcaggaaattctggaagaaaccagaaataaaggggtggtgctcgccctatatgaagctttgagctcacgtgacgttgataaggtccagaaacttctggcctctgaccttgagtggtggttccatggtccaccttcacatcaatttttgatgcgcatcctaactggtactgccaactcggaccactattttttcaaattcattcctcagagtattgacgcctttggatctactgtccttgtcgaaggctgcgatcctgatcgttctattacttgggttcacgcttggactgttaatgatgggataattactcaggttagagagtatttcaatacctctctcacagtcactcgacttgacaataataataattgcccttcatcggatttgtcttccattgctccgtcacgccattgcccttctctttgggagagtagtctacctaatcgggtcggtaagtcggttccgggtcttgttctggctctctgatgtaagtttaacgattgatttgggggttttcgtcactgtttgctttgggttgttttgtttttattttattatctgcaattttaatttgcgaccatgatgaatgggagacccttgtactggttatggtgttgtaatatattatgtgatacggtgcatttggtttcc

SEQ ID NO: 174 - protein, 112 aa, Solanum tuberosum
MRILTGTANSDHYFFKFIPQSIDAFGSTVLVEGCDPDRSITWVHAWTVNDGIITQVREYFNTSLTVTRLDNNNNCPSSDLSSIAPSRHCPSLWESSLPNRVGKSVPGLVLAL

SEQ ID NO: 175 - DNA, 493 bp, Tamarix hispida
gggcagatctagagtggtggttccatggtccgccgtcccaccagtatcttatgcacttgctcaccggtatctccaccgccgacgacagaaccacttcattcaccttcaccgccgactcaggaaccaccgtaggatcatttgtgttggctgaaggctgcaatcctaggcgctcaatcacttgggtccacgcttggacggtgacggatgggataatcactcaggtccgtgagtatttcaacacatctgtcacggtcacccgactcgagggaaacagaggcggcaaccctgttcgtcctgccgggaggaaacagactcctccgtcactcagctctaattctgccattcctccaacttcgtctctaggctccgaaatcgaggggcttccatcgggctgcggcggtcgacatcagcagcagcaatccgtaagggagagcagtcacgccaatcggattggaatttcggttccgggtcttgtcctcgctatctgaccacc

SEQ ID NO: 176 - protein, 145 aa, Tamarix hispida
MHLLTGISTADDRTTSFTFTADSGTTVGSFVLAEGCNPRRSITWVHAWTVTDGIITQVREYFNTSVTVTRLEGNRGGNPVRPAGRKQTPPSLSSNSAIPPTSSLGSEIEGLPSGCGGRHQQQQSVRESSHANRIGISVPGLVLAI

SEQ ID NO: 177 - DNA, 718 bp, Taraxacum kok-saghyz
catttctaattctctctctctctctaaacacgtcaatttctgaccgaactggctaaccctcaagaagctctggaggattccaccaatcagagcgtggtgctccagctctaccatgccctaagctctcgcgacgtcgacaccgttcacaagctcttagcacctgacctcgagtggtggttccatggccctccgtctcatcagtatatgatgcgattgctcaccggaaccgacaacgacgacgctgactccttcgaattcgttcctctttccgttgacgccttcgaatctacagtcatcgtcgaaggctgcgagcaggatcgtgaaatctcctggatccacgcctggactgttaattcgcatggcataatcactcaggtacgggagtacttcaacacttcccttactgtcactcgtttcggtagtaactcttccaaaaccgtcgccattacttcgctccattgtccttctctttgggagagcaccctttccaatcgggtcgggaaatcggtcccgggtttggttctggccatataaaaaggggcggatcccatttgtcttaaatacgttttgtgtggttgaataaaacaataagtcaaagtcaaatttggaagcgcggttttctatgggttgaactagcgtgctattttgcgtctgcgaggatgtaaaacgtgtggctgagattcgtggatactaattgggtctgtttggttattagttt

SEQ ID NO: 178 - protein, 109 aa, Taraxacum kok-saghyz
MMRLLTGTDNDDADSFEFVPLSVDAFESTVIVEGCEQDREISWIHAWTVNSHGIITQVREYFNTSLTVTRFGSNSSKTVAITSLHCPSLWESTLSNRVGKSVPGLVLAI

SEQ ID NO: 179 - DNA, 724 bp, Thellungiella salsuginea
cgaataatcccaccttttttgtttcttctctcgattccggaaactcgccaagaactggatactctggcggattcagagactaagaaccgagacgtggttctgaaactgtatgacgccctgagatctagagacgtcgaatctgttcaccggatcctaaccccagatctggagtattggtttcacggccctccgccgcaccagtttttgatgcgcatcctcaccggagtctctccgccgttcgaattcgttccgctctccgtcgtctccttcggatcgaccgtcatcgccgagggctgcgacgccgctagctccatctcctggatccacgcctggaccgtagcgcatgggataatcactcaggtgagggagtactcgaacacttctctcaccgtcacccgtatcggtaacgttgtcgccggacgctctgctgagattgcgccgtcgcattgtccctccgtgtgggaaagccaactctcgggtcgggctggaaaatccgtcccgggtctggttctggcgatttagaaagagccacgtcagggaataactaaataaaggctgcttacgtgtcagtgtctggttggtttgctgtttatgggttgaaggattttcgtgcggttgagacgcggtgtgtggctgacggctaaggccgcgtttttggctgtcgctaaagttcttcttttgttggattttttttttttttaatttgcttaaaaaatcgtgcttt

SEQ ID NO: 180 - protein, 104 aa, Thellungiella salsuginea
MRILTGVSPPFEFVPLSVVSFGSTVIAEGCDAASSISWIHAWTVAHGIITQVREYSNTSLTVTRIGNVVAGRSAEIAPSHCPSVWESQLSGRAGKSVPGLVLAI

SEQ ID NO: 181 - DNA, 345 bp, Vitis vinifera
atgcaactactcaccggctcatcatcctccgacgatcccttccactttgaccccgtctccatagtggcgttcggatcaactgtcctcgtcgagggctacgaggagcggcggtcggtggcgtgggtgcacgcgtgggtggtgactgatgggataattacccaagtgagggagtacttcaatacttcggttacagtcacgcgactgagcaacacagacaaggcggcggaggggccgtcgacttctacgacggcggctcggtcagttccttgtacgtgtgtttggcagagcaaggtgtgtgagagcatggggaagtcagttccaggactgcttttggctctacagtga

SEQ ID NO: 182 - protein, 114 aa, Vitis vinifera
MQLLTGSSSSDDPFHFDPVSIVAFGSTVLVEGYEERRSVAWVHAWVVTDGIITQVREYFNTSVTVTRLSNTDKAAEGPSTSTTAARSVPCTCVWQSKVCESMGKSVPGLLLALQ

SEQ ID NO: 183 - DNA, 851 bp, Vitis vinifera
atgaccaagaaggcatctccatctgattggttcttccaaactctgacacacggtacaatactgcaaccaaagtactggataactaagacacactggatgaagaaacaaaagagccaaacagaaccttggactccacatccaccagacacgagagattccggtgagttcagcccatatggaaatcgggagtggcagccaaatcactccttctttatttatttattgtatattattatattgcgtacggctgcaagtgatcggcacgtttccttatattgccaggacaagacccggaaccgattttccgacccgatccgagaagctgctctcccagacggaggggcaatggcgcgacggcggcgagggagtcgacgacgacgacgcggcagagatcgacgacgagggtgacgtcgtgaaggaggtgttgaagtactctcggacttgggttattaccccatcagtgaccgtccaggcgtggacccaggcgattgaaccgctgtgatcgcagccctcggcgaggactgtcgaaccgaaagacgcgaaggcgagtggctcgaagacaaatgactcgtcggatgagacaccagtgagcaagcgcatcataaactggtgggaaggcgggccatggaaccaccactcgaggtcggcggcgagaagtcgatggaccgtgtcgacgtcacgtgagcctaaggcttcatatagggcgcgtaccaccctttggttactcgcatcaacctcctccagaatttccggtgagttagccagttctggtagagactccggcgagctaattactagagagagagtaatttcaggagagagaaatggaagaaagagaaagctctgagaga

SEQ ID NO: 184 - protein, 110 aa, Vitis vinifera
MMRLLTGVSSDESFVFEPLAFASFGSTVLAEGCDHSGSIAWVHAWTVTDGVITQVREYFNTSFTTSPSSSISAASSSSTPSPPSRHCPSVWESSFSDRVGKSVPGLVLAI

SEQ ID NO: 185 - DNA, 929 bp, Zantedeschia aethiopica
  misc_feature (747)..(747): n is a, c, g, or t
ggggtctgcttttcttcttcatctccatcgcggggtccctacttacccaatccctccttctccgccttccccttcctcttctttgttctcttctctgtgagctatggttcgcagcagagccacagaggctccccaccggaactggctaaccagggagagataactctggaggagacagaaaacgagcgggtggtccgctccctgtatgacgccctaaacgcgcgagacgtctagacggtgcaccgcctcctcgcgccggacatcgagtggtggttccatggccccccgacctgccagcatatgatgcgcttgctcaccggcgcgtcccgcgacgactccttcgtgttcagccccactaggtacgccatcatcgactccacggtgctcgtcgagggcaacggctgggcgggccgtgcaagcaaccaaccggtgccctttatccacgcctggacggtcactgatgggataatcacccaggtgagggagtacttctacacgtccctcacggtgacccgctgcggcagccccgactcggctggctcctcgccgtcttcctccagcagcagcaaatcgccggcgtcgtcgccggcgtcgcagcaccactgcgtgccgctctggcagagcacgttccccggcggtgccggggagaagtcgatgccagggctggtcctggccatctaatcggcgaacacgcgtctgcccaccccccttcgactggtgacaggtgttctccggcgaagctagctnataaataaaagctggtgatgggctgaagcgaccgagttcgtgcttggctcctcttcatccgaagaataataaatttatagtttgttataaatataatattattatataatagccccttttgtcgggttcgtgtcgcagtaatctatagatgggtatttcctctcatggaagtggtacccatc

SEQ ID NO: 186 - protein, 126 aa, Zantedeschia aethiopica
MMRLLTGASRDDSFVFSPTRYAIIDSTVLVEGNGWAGRASNQPVPFIHAWTVTDGIITQVREYFYTSLTVTRCGSPDSAGSSPSSSSSSKSPASSPASQHHCVPLWQSTFPGGAGEKSMPGLVLAI

SEQ ID NO: 187 - DNA, 788 bp, Zingiber officinale
cgccgctcgcccagaaccgccgaggccgcctactgagttcgccgcttgcgcagcgagagggaagaaggaagagggagacagagagagccgagggggctcgaccggatctggctaacgagaacgcagaggagagcgcgggggaccgcaacgagcggcaagtgctcgcgctgtatgaggccctgaacgcgcgcgacgtggaccgggtgcagcagctgctcgcccccgacctcgagtggtggttccatggcccgccggagcaccagcacatgatgcgcatgctcaccggcgctgacgacgaagccgctgccgagttccgattcgtccccgaccgagtcgccactttcggctccaccgtcgtcgccgagggcaccggccccggcgccgcctcctgggtacacgcctggaccgtctccccggatgggataatcacccaggtccgggagttcttcaacacctccgtcaccgtcacccgcttcgccgctgactcaaccaccaagccctcggtttcgcctggaccgactcactgtctgcccgtctggcagagccgccgcgacaagtcctttcctggactggtcctcgcgatttagacgcaattaatcctaatcacgacatattaattagcgatatatatcaattaatgggctgataattaagcttagtgtgtggtttgcttctattacttaagtttttaattaaagatgaagatggaaggattcatgtcatcctttgtgtgttcgtcattgtcttatatatcgaataaaagatgtctctgtctgcttaaaaaaaag

SEQ ID NO: 188 - protein, 106 aa, Zingiber officinale
MMRMLTGADDEAAAEFRFVPDRVATFGSTVVAEGTGPGAASWVHAWTVSPDGIITQVREFFNTSVTVTRFAADSTTKPSVSPGPTHCLPVWQSRRDKSFPGLVLAI

SEQ ID NO: 189 - DNA, 892 bp, Zingiber officinale
gcacgagggttaaccgagcccacccaccgagcgcaccgcttccgcagcgagagggaaagagagagggaggtcgcgagagagccgagggggctcgtccggagctggctaaccatagcgcaggagagagcctggaggaccgcaacaagtggcgagtgctcgccctgtatgaagccctgaacggtcgcgacgcggaccgggtgcagcagctgctcgcccccgacatcgagtggtggttccatggcccgccggagcaccagcacatgatgcgcatgctcaccggcgctgacgacgacaccgccgccgagttccgattcttccccgaacgagtcgccgccttcggctccaccgtcgtcgccgagggcaccggccccggcgccgccacctcctgggtccacgcctggaccgtctccccggatgggataatcacccaggtccgggagtacttcaacacctccgtcaccgtcacccgagtcgccgctgactcgccgcccaagccctcggtttcgcccaaggactcgcccaggccgactcactgcctgcccgtgtggcagagccgcagccgcaagtcctttcccggactcgtcctggcgatctaaacataagtaatccgaatcattaagtaaagcctaattaatcaatcttaatcaccgaggtgaaggcttaatcaatatatgcatgggctgataaggtcactgtcattcgagtcctaattaagagttaagtctgtggtttgctttaattatcatagttttaataggtaattaagatgaaggagaagcgtagaggaatcatgtcatccttccttcctccttcagtagctgatgatgatgatgctcatgtgtgtttatcattctcttatatattgaataaaagatgcttgtgtgcttgcttt

SEQ ID NO: 190 - protein, 111 aa, Zingiber officinale
MMRMLTGADDDTAAEFRFFPERVAAFGSTVVAEGTGPGAATSWVHAWTVSPDGIITQVREYFNTSVTVTRVAADSPPKPSVSPKDSPRPTHCLPVWQSRSRKSFPGLVLAI

SEQ ID NO: 191 - DNA, 647 bp, Arabidopsis lyrata
acactacacaaaaataagacctttcacttcaaaacctatcctgttctaagtctgaaataataaatttacaaatggaagcacacaacgtagagatatcgacaagacttaccccagaaatgaaaaaccagagaaccatagagttactctacaaagcgttgcagcaaggagacacctcgacggtgaccaaagtggtggccagtgacgtggaatggtggttccatggaccgcaccattgtcaacacatgatgaggctgctaacaggggaacgacggagccaggtttcgttcaggtttgagccaagcagtgtacaagtagtggtgcctggtcatgactgcgtgattgcagaagggtgggagggttcacaagtgtactgggttcacgtgtggaagttgaaagacggagtggtcacggagctaagagagtatttcaacacatggctcactgttacagactacagtcttggagcaataggatgggacatggggcgttgtacggtttgggagagcgtaccaagggacctggctcgtggatcgttgcctagcttgctgttagctatttaactatatgactaaagagtaaattaagtaacacagtttgtgtctggtgggtttctagacttttatgattgtctacttattttcaggttc

SEQ ID NO: 192 - protein, 162 aa, Arabidopsis lyrata
MEAHNVEISTRLTPEMKNQRTIELLYKALQQGDTSTVTKVVASDVEWWFHGPHHCQHMMRLLTGERRSQVSFRFEPSSVQVVVPGHDCVIAEGWEGSQVYWVHVWKLKDGVVTELREYFNTWLTVTDYSLGAIGWDMGRCTVWESVPRDLARGSLPSLLLAI

SEQ ID NO: 193 - DNA, 757 bp, Arabidopsis thaliana
taatgattttattttgactgatagtgacctgttcgttgcaacaaattgatgagcaatgcttttttataatgccaactttgtacaaaaaagcaggcttaaacaatggaagcacacaacgtagagatatcaacaagacttaccccagaaatgaaaaaccagggaaccatagagttactctacaaagcgttgcagcaaggcgacacttctacggtgaccaaagtggtggccagtgacgtggaatggtggttccatggaccgcacgattgtcaacacatgatgaggctgctaacaggggaacctccgaggcaggtttcgttcaggtttgagccaagcagtgtacaagtagtggtgcctggtcatgactgcgtgattgcagaagggtgggagggttcacgcgtgtactgggttcacgtgtggaaattgaaagacggagtggtcactgagctaagagagtatttcaacacatggctcactgttacagactacagtcttggagcagtaggatgggacatggggcgttgtacggtttgggagagcgtaccaagggacctggctcgtggttcgttgcctagcttgttgttagctatttaactacccagctttcttgtacaaagttggcattataagaaagcattgcttatcaatttgttgcaacgaacaggtcactatcagtcaaaataaaatcattatttgccatccagctgatatcccctatagtgagtcgtattacatggtcatagctgtttcctggcagctc

SEQ ID NO: 194 - protein, 162 aa, Arabidopsis thaliana
MEAHNVEISTRLTPEMKNQGTIELLYKALQQGDTSTVTKVVASDVEWWFHGPHDCQHMMRLLTGEPPRQVSFRFEPSSVQVVVPGHDCVIAEGWEGSRVYWVHVWKLKDGVVTELREYFNTWLTVTDYSLGAVGWDMGRCTVWESVPRDLARGSLPSLLLAI

SEQ ID NO: 195 - DNA, 772 bp, Brassica napus
gacatgcatacataaaagaaaaacgtttctccttggaaccatatctgttgttctaagttccaagaaagaaaaataaacacaaatggaagcacacaacgtagagcctttgacaacccctgaaatgaaaaaccggggaaatatagagttactctacagagctttgcagcaaggcgacgcatcgacggtggccaaattggtggccagtgacgtggaatggtggttccatggaccgcacaattgtcaacacatgatgagactactaacaggggaaccaccgagccaggtttcgttcaagttcgagccaagcactgtacaagtagtggtgcctggtcatggctgcgtcatagcagaaggatgggagggttcacaagtgtactgggtccacgtttggaagttgaaagacggagtggtcactgagctaagggagtatttcaacacatggatcactgtcacggattacagtcgtggggcaataggatgggacatggggcgttgcacggtttgcgagagcgtaccaagggatctacctcgtggttcgttacctagcttgctgttggctatttaactgtgtagactaaagtaaaacacagttgtatctggtggtttactctttacctagtaaattaaaaaaaaaagccttatgaatttatgatgttataaacagtagtgtgtttatgaagcgactagctagcaaccaaaaatagttattgtatatatgtgtagggttctttcttgtccttcttataaaattggtctattatttttaaggttt

SEQ ID NO: 196 - protein, 160 aa, Brassica napus
MEAHNVEPLTTPEMKNRGNIELLYRALQQGDASTVAKLVASDVEWWFHGPHNCQHMMRLLTGEPPSQVSFKFEPSTVQVVVPGHGCVIAEGWEGSQVYWVHVWKLKDGVVTELREYFNTWITVTDYSRGAIGWDMGRCTVCESVPRDLPRGSLPSLLLAI

SEQ ID NO: 197 - DNA, 597 bp, Brassica oleracea
acgtttctccttggaaccatatctgttgttctaagttccaagaaagaaaaataaacacaaatggaagcacacaacgtagagcctttgacaacccctgaaatgaaaaaccggggaaatatagagttactcgacagagctttgcagcaaggcgacgcatcgacggtggccaaattggtggccagtgacgtggaatggtggttccatggaccgcacaattgtcaacacatgatgagactactaacaggggaaccaccgagccaggtttctttcaagttcgagccaagcagtgtacaagtagtggtgcctggtcatggctgcgtcatagcagaaggatgggagggttcacaagtgtactgggtccacgtttggaagttgaaagacggagtggtcactgagctaagggagtatttcaacacatggatcactgtcacggattacagtcgtggggcaataggttgggacatggggcgttgcacggtttgggagagcgtaccgagggatctagctcgtggttcgttacctagcttgctgttggctatttaactgtgtagactaaagtaaaacacagttgtatctggtggtttactctttacctag

SEQ ID NO: 198 - protein, 160 aa, Brassica oleracea
MEAHNVEPLTTPEMKNRGNIELLDRALQQGDASTVAKLVASDVEWWFHGPHNCQHMMRLLTGEPPSQVSFKFEPSSVQVVVPGHGCVIAEGWEGSQVYWVHVWKLKDGVVTELREYFNTWITVTDYSRGAIGWDMGRCTVWESVPRDLARGSLPSLLLAI

SEQ ID NO: 199 - DNA, 697 bp, Cryptomeria japonica
tattaccatatcatagaacatttccacagattccagcttggcacacatcctaaacatggttgctaaaagcgtaatctcacacctccaagagggctaaagaccccaccagaacgtgaaaaccactcatacaataaaagagtatatccctgtatttctacttctcagcccaatccacgtacgcaaaacccactaacagcctacatttctaaagaaccgaaatcacccaaagagtctacatctctgtaacaactgcaacaccacacaaagctttgataattatttagggaaaaggcaatccaaagacgattttatcaaattgcgaggacgagcccgggcatcgattcaccgtcagatttgcccaattcactctgccacagtggccggcaaacagaagattttccggatgaggaagaaggagggttaaaatctgtgacgacaagggaagtattgaaatactcacgaacttctgtagctatcccattctccacagtccagacgtgaacccagtacagggattcacccagataaccttccacaaataccttgtcgccgacggcggttaaagtatccgggcgaaatgagaaaccggtgtggtgagaaaggcctgtgagcaagcgcatcaaatactcacagtcgggagggccgtgaaaccaccactccaaatcgggggccaaaatgctctgcactgcccgtgcgt

SEQ ID NO: 200 - protein, 102 aa, Cryptomeria japonica
MRLLTGLSHHTGFSFRPDTLTAVGDKVFVEGYLGESLYWVHVWTVENGIATEVREYFNTSLVVTDFNPPSSSSGKSSVCRPLWQSELGKSDGESMPGLVLAI

SEQ ID NO: 201 - DNA, 519 bp, Citrus sinensis
ccacgcgtccgaatgatgaaatgcagaacgtggccaaatatttggctagtgacttggagtattggtttcatggcccaccaacatgccagcatatggtgaggttgctgaccggagaatcaagcaaagcgacgttcaagttcgagccgcgaagcgtggaggtggtgggggattgtgtgatagctgagggctgggaaggagctccagcttactgggtgcatgtgtggactgtgaatgtgaaagatggcttgatcactcaatttagagagtattttaatacatggctcactgtcaaagatttgaggccaccgcgttgggagatcagagtcagacatgaacggaacactttgtggcagagccagccgagggatcttgctcgccgctcattgcctagccttttgctcaccatttaggtttttgatgctgttgttgttgcatggaaatgtagctagctagctttggttagctggctagctttggaaataactgtaaaatttaatgtttaagtatattttgcatgtg

SEQ ID NO: 202 - protein, 129 aa, Citrus sinensis
MQNVAKYLASDLEYWFHGPPTCQHMVRLLTGESSKATFKFEPRSVEVVGDCVIAEGWEGAPAYWVHVWTVNVKDGLITQFREYFNTWLTVKDLRPPRWEIRVRHERNTLWQSQPRDLARRSLPSLLLTI

SEQ ID NO: 203 - DNA, 738 bp, Centaurea solstitialis
ttggcggggatcttacatagaaacatcatctccctcctaaatgaatcaaatcgtcgaaaaccaacaagaaacccaaaaccaagccaccgtcgaagttctctacaaagcgttggcccatggagacaccaaaacggttgccggaagtctagccggcgacctggagtggtggtttcacggccctcaaaactgccatcacatgatgcgcatgctcaccggggaggcgccccacacggagttcaagttcgaaccccgaagcattacggccatcggcggcgacatggtggtcgtcgaggggtacgagggcgcaaacgtatactgggtgcacgcttggaccttgaaagacgggttgatcacccggttccgagagtatttcaacacgtggctcacggtgaaggagttgagggtgagacggtccaccttgtggaggagccaacctcgggaccttttccgccgctcgttgcccggactcatgcttgccatttgatccgtcgcggctgttagcgacggatccggttttttttagcgacggagaatttcgtcgctaaaggccttttcgtttatagtggtgccattaatgttaattaaatatttattaaaacttaaaagtatcttgttgaatgtgtttttgaaaactgtggttatgtggtttttgaggcggttgatctttctgccatggttaattaattgtgataaattttaggtctttttaattgttatggtttctaaaaagttttttag

SEQ ID NO: 204 - protein, 147 aa, Centaurea solstitialis
MNQIVENQQETQNQATVEVLYKALAHGDTKTVAGSLAGDLEWWFHGPQNCHHMMRMLTGEAPHTEFKFEPRSITAIGGDMVVVEGYEGANVYWVHAWTLKDGLITRFREYFNTWLTVKELRVRRSTLWRSQPRDLFRRSLPGLMLAI

SEQ ID NO: 205 - DNA, 650 bp, Closterium peracerosum
ctgttttcctcgcctttccctctaagctctctccgttcatcccgttttttcaataacgtccgagctggagtcgcggaacctcagtattgtcagggagctttatgccgctctcggatctggcgacctgctgagagcccgagcgcgcttggcggaggacgtggactggtggttccatggtcctaaagctcgccagctgcgttgcatgcaatttctgtcgctgattgtcggcgaggtcgattctgatggtgtgaagttcatgcccgtcgatgtgactgccaagaacgacaaggttatttccgagggtgtcagcgtcgtgaggactcgtcgtggagcgcttgtggatgtggcgtgggtccacgtgtggacgctgtcgcccgccagcggcagagtgactggtctccaagagttcgtcaacactgctgtttccgcgactgtgcttggacctgtctcgggctcgctgagtgcgctgcctgcggcttcatgccgcgaggctatggcttccggctcgaagcttggtgctagcgctgtagcttctagcgggcttcaagtctgggagtctcgcctgtggcgtgagcagaagtcttctttgcctggtctcatcctcaccctttgagttcagctagttctgaagtggttgagtgaggatgtct

SEQ ID NO: 206 - protein, 136 aa, Closterium peracerosum
MQFLSLIVGEVDSDGVKFMPVDVTAKNDKVISEGVSVVRTRRGALVDVAWVHVWTLSPASGRVTGLQEFVNTAVSATVLGPVSGSLSALPAASCREAMASGSKLGASAVASSGLQVWESRLWREQKSSLPGLILTL

SEQ ID NO: 207 - DNA, 564 bp, Festuca arundinacea
ggcacgaggtggttccatggcccgcccgcgcaccagcacatgatgcgcgtcctcaccggcggggcctcctccttccgcttcgcgccgcgcaccgtcgaggccttcggctccaccgtcatcgccgagggcgcctccgccgccggcgaggggaaggcggcctactgggtgcacgcctggacggtgggatccgatggggtgatcacccagctgcgcgagtacttcaacaccgacctcaccgtcacgcgcctcgccgccgcggccgcctccaagtgcgtctggcagagccgccgccccgacagcgcccgcaactccctcccgggcctcgtcctcgccctctagccaatccgtccgacttggatgcatgggctgacgtttgcttaatttcttccctgtctggattgctgtcgttagttaatttgcgtgtctggtactactactgcccgagtcgccggtgatcgatggcgacgcggcggcgtcatggaggctgcaccttcgcggctgctacctgcatgccgttgctgttatggtcgaataataaaggaatttggtttgcattaaaagggg

SEQ ID NO: 208 - protein, 99 aa, Festuca arundinacea
MMRVLTGGASSFRFAPRTVEAFGSTVIAEGASAAGEGKAAYWVHAWTVGSDGVITQLREYFNTDLTVTRLAAAAASKCVWQSRRPDSARNSLPGLVLAL

SEQ ID NO: 209 - DNA, 676 bp, Fragaria vesca
cataagcacacgaagagttagagcaactcattcatttccatcttctaagctcccaaaatgcaggacaacaaggctattgtggaggctttgtacaaggcgttggcccaaggccaaaccgagacagtggcgaaggttttagctactgacctggaatggtggttccatggtcctccgaagtgccagcacatgatgaaggtgctgacaggggattccggtcacgttggcttcaagttcgagccgagaagcgtaacggagattggtgactactgtgttattgctgagggctgggaaggagctcaggcttactgggttcatgtgtggacgatcaaggatggtttgatcactcagttcagggagtatttcaacacgtggctgactgtgagggatctgaagccgctagggtggaaggagagtaagagcttcactgtgtggcagagcatgccaagggacctgttccaccgttctttgccaagccttctgctagctatttagtgtctaatttgagtaagactgtgagactatatatgttgttgtacttaattaggaagaaaaatatgaaaatattagagaaaaaataagggtgctatagttgtacgtggttgaaaactcttgtatcaacaatgaaatggcaaaagatggccatcttgctatgttgaacattgacgtatgattaatg

SEQ ID NO: 210 - protein, 144 aa, Fragaria vesca
MQDNKAIVEALYKALAQGQTETVAKVLATDLEWWFHGPPKCQHMMKVLTGDSGHVGFKFEPRSVTEIGDYCVIAEGWEGAQAYWVHVWTIKDGLITQFREYFNTWLTVRDLKPLGWKESKSFTVWQSMPRDLFHRSLPSLLLAI

SEQ ID NO: 211 - DNA, 1006 bp, Glycine max
actctcaaattaaacttcccatatcaaaatgaagcacatatctagctccattgaaatttcagaaatgggagcagagaggcacgagaaagaggaaatgcataacaaggcaactgtggaagcactctacaaggcccttttagggcaaggccaaatggacacggttgcaacaaacatgctagcaagtgacctcgagtggtggttccatggcccccctcagtgccagcacatgatgagggtgctcaccggagagaccaccctcgacaacaacgggttccggttcgagccaaggagcgtcaccgccatcggcgattgcgtgatcgccgaggggtgggaaggcaaggcctactgggtgcatgtttggaccgtgaggaatggccttatcacgcagtttagagagtacttcaacacatggcttgtggtccgggacttgaggtctcaaaggtgggaaaacaagcttgacaacatgacattgtggcaaagccagccgcgtgatctatatcgtcggtccctgccaggacttgtgctagccatttagctacaagagagaaatgctagcaatgtactaaaaaaaaaacagagaaattattatatagactaagaccatagtgtgtttgtaatcctgatcaatctaaatgtgacaaaattaagttttattaactctgtcacgttcagattgatcagaaccatagacatgtagtagtggtcatcgactatacaataaattctccataagatgaaatttatgtgaggtttattagttttgtttaaattaagtgtgttattatttaccaaaaccttcatgaatttgatccaataagggaaagtgttttgaaaagagtatgttgatggtataggtcttgggtgaagttcaaggatgtgaaattgtgggcaaaataatagcttgggatgtaacctttgcagggttgtgtacctgtggtcaactcaaccacattgagttttggtacatatttggtttgtgtaactgattaatagaaaatgacggtcg

SEQ ID NO: 212 - protein, 168 aa, Glycine max
MKHISSSIEISEMGAERHEKEEMHNKATVEALYKALLGQGQMDTVATNMLASDLEWWFHGPPQCQHMMRVLTGETTLDNNGFRFEPRSVTAIGDCVIAEGWEGKAYWVHVWTVRNGLITQFREYFNTWLVVRDLRSQRWENKLDNMTLWQSQPRDLYRRSLPGLVLAI

SEQ ID NO: 213 - DNA, 522 bp, Glycine max
gtgcaaccatttcctaaaacacaagcctagaagcataaatttcacacaaaaaaaattcaaagcatggaggatcatcaaaaggtggagatgcaaaacaaggcaagagttgaagtgctctacaaggcactattagggcaaggaacaatggacaatgtggccaaattgctagcaagtgaccttgagtggtggttccatggccctcctcattgccaccacatgatgaaggtgctcacaggggaaacagatcacaccaagggcttccggtttgagccgaggcgagtcacagccgtcggagactgcacgatcgctgagggctgggagggcaaggcgtattgggtgcacgtttggaccctaaaaaatggcctcataactcagtttagagagtacttcaacacatggcttgtggtgagggatttgaggcctccaaggtgggaagatagcaaagatagcatgacattgtggcaaagccagcctcgtgatctctatcaccggtcactgccagggcttgtgttaactatttag

SEQ ID NO: 214 - protein, 152 aa, Glycine max
MEDHQKVEMQNKARVEVLYKALLGQGTMDNVAKLLASDLEWWFHGPPHCHHMMKVLTGETDHTKGFRFEPRRVTAVGDCTIAEGWEGKAYWVHVWTLKNGLITQFREYFNTWLVVRDLRPPRWEDSKDSMTLWQSQPRDLYHRSLPGLVLTI

SEQ ID NO: 215 - DNA, 492 bp, Glycine max
atgaagaccatccccggcagcaaggccgagccggagaaactctccggcacggcagcggatcacgaaaaccgcaaccgggagacggtgaaaatggtgtacaaggcattgcgtgacggcgacacggagaagctggcgaaggtggtgagggtggagttggaatggtggtaccatggacctcctcactgccagcacatgaagaaagtgttgaccggggagtcaacggcgacgcaaaaggctttcaagtttaggcctcggaggatcagggccgtcggtgaccgcgtgatggttgaagggtgggagggggcgggggagtactgggtccacgtgtggaggctcaagcacgggattattgcccagcttcgtgagtatttcaacacgttgatcacggtggtgcttcgggttttggaggacggtgatgaggctcggttgtggcggagcaccgaccgggttcgggttcaagggtcgttaccggatattgtgctttccatttga

SEQ ID NO: 216 - protein, 163 aa, Glycine max
MKTIPGSKAEPEKLSGTAADHENRNRETVKMVYKALRDGDTEKLAKVVRVELEWWYHGPPHCQHMKKVLTGESTATQKAFKFRPRRIRAVGDRVMVEGWEGAGEYWVHVWRLKHGIIAQLREYFNTLITVVLRVLEDGDEARLWRSTDRVRVQGSLPDIVLSI

SEQ ID NO: 217 - DNA, 501 bp, Glycine max
atgaagatcatccccggcagcaaggccgagccggagaaattctccggcacggtcacggaacacgaaaaccgcaaccgggagacggtaaaattggtgtacaaggcattattgcgtgatgccgacacggagaagcttgcgaaggtggtgagggcagagttggaatggtggtaccacgggcctcctcactgccagcacatgatgaaagtgttgaccggcgagtcaacgacggcgcaaaaggccttcaagtttaggcctcggaggatcagggccgtcggtgaccgcgtggtggttgaagggtgggagggggcgggggagtactgggtgcacgtgtggaggttcaagcacgggatcattactcagctgcgtgagtactttaacacgttgatcacggtggtgcatcgggtttcggaggacggcgatgaggctcgcttgtggcggagcaccaaccgagttcgggttcgggttcacgggtcgttgccggatcttgtgctttccatttga

SEQ ID NO: 218 - protein, 166 aa, Glycine max
MKIIPGSKAEPEKFSGTVTEHENRNRETVKLVYKALLRDADTEKLAKVVRAELEWWYHGPPHCQHMMKVLTGESTTAQKAFKFRPRRIRAVGDRVVVEGWEGAGEYWVHVWRFKHGIITQLREYFNTLITVVHRVSEDGDEARLWRSTNRVRVRVHGSLPDLVLSI

SEQ ID NO: 219 - DNA, 713 bp, Glycine max
acataagcccagaagcataaatttcacacaaaaaaattcacaacacggaggatcattaaaaggtggagatgcaaaacaaggcaacagttgaaatgctctacatggcactattagggcaagaaacaatggacaatgtggccaaactgctagcaagtgaccttgagtggtggttccatggccctcctcaatgccaccacatgatgaaggtgctcacaggggaaacagatcacaccaagggcttccggttcgagccgaagcaagtcaccgccattggagactgcgtgattgccgaggggtgggagggcaaggcctattgggtgcacgtttggaccctcaaaaatggcctcataactcagtttagagagtactttaacacgtggcttgtggtgagggatttgaggacaccaaggagggaagatagcaaagatagcatgacattgtgggaaagccagcctcgtgatctctatcaccggtcactgccaggacttgtgttaaccatttagccacaacaacacttgatggttgtggttaattggaacttgaattggaagctagttattagggacgtgatgtgtaatgtaccttatagtggcccctacggattaaacatgttgctctacaacattggaactattatactgttcgtacatatttggcttgtggacctggttgattgttcaataaaatggttttcatcattttgaatcaaaagg

SEQ ID NO: 220 - protein, 144 aa, Glycine max
MQNKATVEMLYMALLGQETMDNVAKLLASDLEWWFHGPPQCHHMMKVLTGETDHTKGFRFEPKQVTAIGDCVIAEGWEGKAYWVHVWTLKNGLITQFREYFNTWLVVRDLRTPRREDSKDSMTLWESQPRDLYHRSLPGLVLTI

SEQ ID NO: 221 - DNA, 726 bp, Helianthus annuus
catttgtggtaccgggaatcggccattcggccggggactcaatactattagttctcaccaaaaatgggagaaattaatgtaactgaacccaaaagccaaaaccaagcccttgtccatgctctttacaagacactagccagcggtgacactaaacatgtctctggaatattagccactgacctggagtggtggtttcatggccctctaaactgccacccacatgatgcgcatgctgaccggagaagccctaccaaacgagttcaagttcgaaccgcgaagtataacagccattggctacgagatagtgattgctgagggctacgaaggcgcacatgtgtattgggtacatgtgtggaccctgaaagatgggctgataactcgatttagggagtattttaacacgtggttgacggtgaaggagttgaagcccaagcccgttggacagtgggtgtcgaaggagaactgctccaccgtgtggcagagccagcctcgtgatcttttccggcggtcgttgcccgggctcatgcttgccatttgatgtcacaaatggtcaccattgttgtgtataagtaccatctacttcttgttcccttctaattgatgtgtcaagttcatgaagcaaacatgcaatttgcacacgttttttttttttgttaattgtgtgaaaagtttaaaaagtatttttaatgtgtacatttacccaagttatagtatggaagaatgacg

SEQ ID NO: 222 - protein, 105 aa, Helianthus annuus
MMRMLTGEALPNEFKFEPRSITAIGYEIVIAEGYEGAHVYWVHVWTLKDGLITRFREYFNTWLTVKELKPKPVGQWVSKENCSTVWQSQPRDLFRRSLPGLMLAI

SEQ ID NO: 223 - DNA, 725 bp, Helianthus exilis
ggagaaattaatgtaactgaacccaaaagccaaaaccaagccattgtccatgtctctttacaagacactagccagcggtgacactaaacatgtctctggaatattagccactgacctggagtggtggtttcatggccctctaaactgccaccacatgatgcgcatgctgaccggagaagccctaccaaacgagttcaagttcgaaccacgaagtataacaaccattggcgacgagatagtgattgctgagggctacgaaggcgcacatgtgtattgggtacatgtgtggaccctgaaagatgggctgataactcgatttagggagtattttaacacgtggttgacggtgaaggagttgaagcccaagcccattggacagtgggtgtcgaaggagaactgctccaccgtgtggcagagccagcctcgtgatcttttccggcggtcgttgcccgggctcatgcttgccatttgatgtcacaaatggtcaccattgttgtgtataagtaccatctacttcttgttcccttctaattgatgtgtaagttcatgaagcaaacatgcaatttgcacatgttttagtaaattatgtgcaaagtttaaaaagtattgttgatgtgtacattcacccacgttaaaagtattattaatgtgtacatttacccagcgactcatttccaacaaattggaattgtttagttgtgtattgttaatatgataaagatgtt

SEQ ID NO: 224 - protein, 140 aa, Helianthus exilis
MSLYKTLASGDTKHVSGILATDLEWWFHGPLNCHHMMRMLTGEALPNEFKFEPRSITTIGDEIVIAEGYEGAHVYWVHVWTLKDGLITRFREYFNTWLTVKELKPKPIGQWVSKENCSTVWQSQPRDLFRRSLPGLMLAI

SEQ ID NO: 225 - DNA, 940 bp, Hordeum vulgare
gcgagactcctgctcacctcacgagcaccaggtaagtagctgaggacctcagcctgaggtcgagccgccgtcgccatcgccgtcgtcgtcttcttcttcgtctccggcagggagcctcgggaggagctggctaacgagctggatcagctggagggcgggatcgcctcggcgccgcgcgggcacgagaccgaggagcagcgcaacaagttcctggtgctccgcctctacgaggcgctcaacgcccgcgaccacgccgccgtccactccctcctcgcccccgacctcgagtggtggttccatggcccgcccgcgcaccagcacatgatgcgcctcctcaccggcggcacatcaccgtcctccttccgcttccagccgcgctccgtcgacgccttcggctccaccgtcatcgccgagggcgtggacgacaaggccaccaaggcctactgggtgcacgcctggacggtgggcggcgatggggtgatcacccagctgcgcgagtacttcaacaccgacctcaccgtcacgcgcctcgccgccgccgccgcctccaagtgcgtctggcagagccgccgccccgaccgcgcccgcaactccctccccggcctcgtcctcgccctctagccacccaacccaagccaagccggacgacgacggccaccacttgggcgcacgcatgggctgacgctgctgtctttctttctttcttcatcaaccatcccctactctgctctccctggcctagttgtttcttgtttgcgtgtctggtgaacgtacgtagcatagctgaatagtcgccgaccaaccggccggtgatggcgacgcggcgccgtcatggcggctgcgtcttcactgctactgcttgtgtgtcttcgtcgttgctgtcatggtgtaatcatagtaatagtgataaaaggaagttggcttgtactggacgtaattt

SEQ ID NO: 226 - protein, 99 aa, Hordeum vulgare
MMRLLTGGTSPSSFRFQPRSVDAFGSTVIAEGVDDKATKAYWVHAWTVGGDGVITQLREYFNTDLTVTRLAAAAASKCVWQSRRPDRARNSLPGLVLAL

SEQ ID NO: 227 - DNA, 668 bp, Hordeum vulgare
tcccaccggccaccgtatctcgctgcctctcgccgagacgatcaccagcatcaggtagttgaggtccagccgccgtcgccgtcttcttcttcgtctccgacaggaggagctggctaacgagctggatcagctggagggcgggttcgcctcggcgccgcgcgggcacgagaccgaggagcagcgcaacaagttcctggtgctccgcctctacgaggcgctcaacgcccgcgaccacgccgccgtccactccctcctcgcccccgacctcgagtggtggttccatggcccgcccgcgcaccagcacatgatgcgcctcctcaccggcggcacatcaccggcctcctcctccttcatcttccagccacgctccgtcgacgccttcggctccaccgtcatcgccgagggcgtggacgacaaggccaaggcatactgggtgcacgcctggacggtgggcggcgatggggtgatcacccagctgcgcgagtacttcaacaccgacctcaccgtcacgcgcctcgccgccgccgccgcgtccaagtgcgtctggcagagccgccgccccgaccgcgcccgcaactccctccccggcctcgtcctcgccctctaactgcaatgtgatatgtacattcttttagtgtgtgggactacttaccacatttccacatgtc

SEQ ID NO: 228 - protein, 100 aa, Hordeum vulgare
MMRLLTGGTSPASSSFIFQPRSVDAFGSTVIAEGVDDKAKAYWVHAWTVGGDGVITQLREYFNTDLTVTRLAAAAASKCVWQSRRPDRARNSLPGLVLAL

SEQ ID NO: 229 - DNA, 660 bp, Malus x domestica
aattcggacgaggcaaattagagagcaaaagccaataatattctcagttaattccgctcccctcctatctcccctctctctctctctctctttctctctctctctctctctctctctctctctctaacaatctaccaaaaatgcagaacaaggcaattgttgaagctctctacaaggcattggcacagggcaaaacagacacagtgggaaagcttctagccagtgacctagaatggtggttccatggccccccaaagagccagcacatgatgcgcgtgctcacagggaagtccagccacactgacttcaggttcgagcccagaagcatcacagagattggagatggtgtgatcattgccgagggatgggaaggggccaaggcctactgggtccatgcgtggaccctcaaagatgggttgattacgcagttcagggagtattttaacacgtggctgactgtgagggatctgaagctggaggggtgggagagcttcactgtgtgggagagcatgccgaatgacctgttccaccgctccttgccagccctattgcttgctatttagaattttaattagaggacttgatgttgtgaattagcaagaaaaaaatatgggatatggagaaaaattaaataaagggtgcttgtggtttggcctcgtg

SEQ ID NO: 230 - protein, 140 aa, Malus x domestica
MQNKAIVEALYKALAQGKTDTVGKLLASDLEWWFHGPPKSQHMMRVLTGKSSHTDFRFEPRSITEIGDGVIIAEGWEGAKAYWVHAWTLKDGLITQFREYFNTWLTVRDLKLEGWESFTVWESMPNDLFHRSLPALLLAI

SEQ ID NO: 231 - DNA, 672 bp, Malus x domestica
ctcccctcctagctagcaccctcagttcatcctctctctctctcttacaatctaccaaaaatgcaaaacaaggcaactgttgaagctctctacaaggcgttggcacagagccaaacagacacagtgggaaagcttctagccagtgacctagaatggtggttccatggccccccaaagagccagcatatgatgcgcgtgctcacgggggattccagccacactgacttcaggttcgagcccagaagcatcacagagattggtggtggtgtgatcattgctgagggatgggaaggggcaaaggcctactgggtccacgtgtggaccctcaaagatgggttgatcactcagttcagggagtattttaacacgtggctgactgtaaaggatctgaagccggagggatgggagagcttcactgtgtggcagagcatgccgagggacctgttccaccgctccttgccaaccctattgcttgctatttagaattttaattacagtctttgatgttgtgaattagcaataaaaaatatgggttttgagaaaaataaagggtacttgtggtttgtagatttgagtttgaacaaggcatgatttggatgtgttgagaaaattgaagtgatgtagtaaaatggaactactaataaagatgtttccaaaacacaactttcgttc

SEQ ID NO: 232 - protein, 140 aa, Malus x domestica
MQNKATVEALYKALAQSQTDTVGKLLASDLEWWFHGPPKSQHMMRVLTGDSSHTDFRFEPRSITEIGGGVIIAEGWEGAKAYWVHVWTLKDGLITQFREYFNTWLTVKDLKPEGWESFTVWQSMPRDLFHRSLPTLLLAI

SEQ ID NO: 233 - DNA, 1631 bp, Marchantia polymorpha
cctgccttctcctctccctttctccccgagtcccttcgcgtctcgtcgctgcatctcgttcatctcgagcggcgtttcagttcgcgaaaaaaatctcctccaatcctcagacttctccttcagtcgttctccaaatcgagtcgtgagcccgacctcgacacgagcatcgctgtcgctgtgcttgcaaggcagaattgaagcagacgagtggaattctgtgattccgtggcagttggttgatcgtgattgtgtttgtgcgtgcgtgcgtgtgttggttgtgtttgcgtttgtagagtgcgcgtcctcgtaaggaagatagcggaaatttttgaagagctggcgaataccggaacactggcagacacaaactcagatgaagggatagttcgagcgctttaccgagcgttatcgcaaggagatgttcaccccgtgagcaagctcgtgacccctgacctcgagtggtggttccatggaccgccgagtcaggatcatatgatgcgattgctcaccggagccgcttcatgtgactccttcagctttgagcccgtgcggttcttctcccaaggtagcaaagtttttgtggagggcaagcactctactcgacataacgtgttctgggtccacatatggacggttaaagaagggcgcattactcaattgcgcgaatacttcaacactgcggtcctggtgaccgatctcaagccgaacaagccgtctgtagagatcgtctcaagctatccttgcactactatttggcagagtcagctctggaagagcaaggaagggaaatctcttccaggcttcattcttgcggtttgagaagattccgcgacttcgaagtcgcggtgttcaacgttctcattgcgggaaatgcagactcgtgaaataagtactatgatcacatcgtgagttggcacccaggaagctgaatttctcgagattgcagtaatgcactgcaagttttggcgaaaacatctagctagaaggtgttagcgaataatcgtgttatatcggcagaattttatgtcttctgtttttatgttttgtagtttggcctgtggagctgacggagatctgaaactttgttgttgagtgcgagtgctaggagagagagagagagatcgacgggtgattgacacgtcttagcaaacctgtcccacctcgtttgtttactcttatcggtcttatttgctgtcgatcatgtagagagacatagaggagatcatgcctaaacctctaggactgaaaactggaagcgcagaccaactgttagatgaaggtctccaccagattcctcaccatcatactaagacttacacatacgtatggttcacgcttcatcgttatttcgatgaaggacttgtccaacatacattttgccgaaaggatgatctttcattcattccttgtgggaagagtacactgttaaattttggagaatgggagatgtaaccaggctacatgcataatgatgtacgatctaaaactgagacatgcaaatgaataaggaagagtaactgtcgctctatatgcttggagataaaaacataaaaagtttatcaacagagataatatttccctgcaacttccgggcgaatgaatacatataaagtggggtaattcctcatttt

SEQ ID NO: 234 - protein, 108 aa, Marchantia polymorpha
MMRLLTGAASCDSFSFEPVRFFSQGSKVFVEGKHSTRHNVFWVHIWTVKEGRITQLREYFNTAVLVTDLKPNKPSVEIVSSYPCTTIWQSQLWKSKEGKSLPGFILAV

SEQ ID NO: 235 - DNA, 1538 bp, Nicotiana benthamiana
gtgtttccatagtttgtggatatctttcccctttcgaaaaatgactccttccatttccattgattccaatacaaacatgaattcagaaacagaaaacaagaacaaggccatagtgaaaactctgtacaaagcattagcttgtacatgtggtgacagtactaaaaacctactggggtctaatatttgctcatatattgccgatgatttagaatggtggtttcatggaccacagaattgtcattatatgatgaaaatgctcaccggagaattgtcaaatcagaattgtttcaagtttgagccaagaagtattgatgcaattgatgatgatcgtgtgattgttgaaggatgggaaggtgcaaaggcttattgggtacatgtttggacattgaaagatggtgttattactcagtttagggagtatttcaatacttggcttactgtgactgagttaaggcctatgggatgggtaagatcctctaccacgctgtggcagagccaccctcgagacctcgcgaaacggtcattaccagggcttatgctagccatttgacggtgaacaatggaacgacgaaaacttataatatgtggaatttacactggattgcatcatttaattatggttaagtgaaaaagaaatatatgtaattaaaaatgcattcaactgttgattaattgatggtaacactactaaatgtggtaataagttttttatacggtgaatgcatgttttatgtagtatagcccattaaggaaaaataagccaacgagtgtttcctattccccttacctaaaagtgaaaagtggataagtaagaagtttggttgtatatccaacggattatattaggaaatattgtacgcatgaattattggttaaacatgttatactgatcatagtttcatagtagcaaacacaataacaaatgaggttttccgtggagactctacgtggcaaccccttaattagtcgcctaaaaagtaagattcaacataaacaagtttccagaaaaaagtgatagtcttaattaaggctgtattgtgtggcggttctaggtttatttgtgcctggcgttccgggtctaacggtttcggttctggcggtttcgggtctggcggttctgccggttccgacggttccgggtctggcgattctcatggttggaaccggcccgtgacgggtctaagtaccatgcgattccggttctggcggttccgggtctggcgggtctgacgttttttttttaattcaatatcttgtatagtagtcattagtatagtgtagaatataatttatatggtgtactaagttattagtataatatatattgtgttgtagtaattagtatacattgtatataagtagtatatattgtatataagtagtatatattgtatatatgtagtgtatattgtgttgtagttagtaattagtataaattgtatataagtagtatatattgataaaagaatgttgtaattagtatattgtattgtatgttatatattgtatgttatataaatattcaaggattgatatcg

SEQ ID NO: 236 - protein, 169 aa, Nicotiana benthamiana
MTPSISIDSNTNMNSETENKNKAIVKTLYKALACTCGDSTKNLLGSNICSYIADDLEWWFHGPQNCHYMMKMLTGELSNQNCFKFEPRSIDAIDDDRVIVEGWEGAKAYWVHVWTLKDGVITQFREYFNTWLTVTELRPMGWVRSSTTLWQSHPRDLAKRSLPGLMLAI

SEQ ID NO: 237 - DNA, 852 bp, Nicotiana tabacum
tgagtttccaaagtttttggataacttttcccttcctttttcctttcaaaaaatggctccttccatttccattgattccaatacaaacatgaattcagaaacagaaaacaagaacaaggccatagtgaaaactctgtacaaggcattagcttgtacatgtggtgacagtcctaaaaacgtactggggcctaatatttgctcatatattgccgatgatttagaatggtggtttcatggaccacagaattgtcattatatgatgaaaatgctcactggagaattgtcaaatcagaattgtttcaagtttgagccaagaagtgttgatgcaattgatgatgatcgtgtgattgttgaaggatgggaaggtgcaaaggcttattgggtacatgtttggacattgaaagatggtgttattactcagtttagggagtatttcaatacttggcttactgtgactgagttgaggcctatgggatgggtaagatcctctaccacgttgtggcagagccaccctcgagacctcgcgaagaggtcattaccggggcttatgctagccatttgacggtggtgaatggaacgaggaaaacacttactcatatgcggaatttacacaggatcacatcatttaatcatggttaggtgataaagaaatatatgtaaaaagacgcattctactgtgattaattgatggcaacattaaatatggtaagtgttttatatggtgaatgcatgttttatgtagtatagcccattaggaaaaagaagccaacgactgattacctttttccctttcctaaatgtgaaaaatggaaatgtaagaagtttggttgtatatccaactgattatatatg

SEQ ID NO: 238 - protein, 169 aa, Nicotiana tabacum
MAPSISIDSNTNMNSETENKNKAIVKTLYKALACTCGDSPKNVLGPNICSYIADDLEWWFHGPQNCHYMMKMLTGELSNQNCFKFEPRSVDAIDDDRVIVEGWEGAKAYWVHVWTLKDGVITQFREYFNTWLTVTELRPMGWVRSSTTLWQSHPRDLAKRSLPGLMLAI

SEQ ID NO: 239 - DNA, 1254 bp, Oryza sativa
actccagccagcgagcgatccacctcgatctcttctcttcctctctctctctctctctctctctctctctctctctcctgagcgccaatcgatctcgtgatctagagctcgcttcctcgacttcgtgtcaaacaccgggaggagcggaggccgatcggagcctaagcggggctcgcgccaggagctggctaaccacaggcagggaacggcggcggcggcgcgcgaggcgtcggcgtcggtgtcggagctggcagagctggacggcgcaagggatcagccggaggagcaggacgccaagttcctggtgctgcggctgtacgaggcgctcaactccggggacgcgcgcagggcgcaggagctgctcgcgccggacctcgagtggtggttccatgggccgccggcgcaccagcacatgatgcgcctcctcaccggcgccgaccacggcgagtcaaggttcctcttctcccctcgctccgtcgacgccttcggctccaccgtcatcgccgagggcaccgacgacacccgccagctctactgggtgcacgcctggaccgtcggccccgatggggtaatcacccagctcagggagtacttcaacaccgacctcaccgtcacccgcctctccgcctccgccgccaagaccaccgccgccatttcttcctccaactccaaccacgcctcctcttcggcgccgccgccgccgccgtccaagcccaagtgcctgtggcagagccgccgcgccgaccgcgcgcacaagtcgctgccgggcctcgtcctcgccatctaagaacgaactcaaaagacatcaagaactcaaggcgcaaaaagcttccctaaattaatcacatataaaaaaaatcaagcgatacttatcaatagtgattagctaaataaataaaaacggaagcgcacgcactgagtgaagtcactagctatagtttattgcttatgggctaaagccgctcagctcaactgagctgcttcaggtttgcgtgattaatcccactaccactactgcaactagccagccagttaagtagtgttgcttttgcttgcttgtctgaaagctgaatcagcagtgtgaccagtagcatcagtagctttggtccaagtcattatggattatgtaagtgtgtactccttccacggtaaagctaaaccgtggctgaatatgaatgatggtctgttgttgttgcataaaagtactcgtagcttgttttgttggacacttaaaatcaacatatgtgatgtaca

SEQ ID NO: 240 - protein, 124 aa, Oryza sativa
MMRLLTGADHGESRFLFSPRSVDAFGSTVIAEGTDDTRQLYWVHAWTVGPDGVITQLREYFNTDLTVTRLSASAAKTTAAISSSNSNHASSSAPPPPPSKPKCLWQSRRADRAHKSLPGLVLAI

SEQ ID NO: 241 - DNA, 759 bp, Oryza sativa
atggtccactttaacatgtggcatggcatgatggtaaatggatttatggatatcagtaatctgtcggcaaagataatctgccaggggaagatgttgatctctgtcagcagaagtggtactggagacagattgagagattacaaattaatatatgcattagatgttggtaaaactttcggcgactacgacagcccagcagcagcagcagagctggctagcgacaaggtacacgcgaacggcgacgccgccgatgccggcggcggcggcgaggaggaggtggtggtgagcagcagcaaggcggtggtggaggagctgtaccgcgcgctggagcgcggcgacggggacgccgtgcggcggctgctgaacccggacgtggactggtggttccacgggccccgcgcgcaccagcatctggtgctcatgcgcctcctcaccggcggcggcggcggcgcggcggggctcccgttcaaggtccgcggcgtggacgccttcggggagacggtgctggcggaggggacggacgccacggggaagctgtactgggtgcacgcgtggacggtcggccccggcggccgcgtcaccggcgtccgcgagtactgcaacaccgcgctcgtcgtcaccaggctcggcggcggcggaggcggcaagggagccgaggcggcggcgccgtgctcgaggtcgcagtcggagcagttgtggcagagcaggctgcctgaccgggctcgcaagaacctccctgccctcgtcctcgccatctga

SEQ ID NO: 242 - protein, 252 aa, Oryza sativa
MVHFNMWHGMMVNGFMDISNLSAKIICQGKMLISVSRSGTGDRLRDYKLIYALDVGKTFGDYDSPAAAAELASDKVHANGDAADAGGGGEEEVVVSSSKAVVEELYRALERGDGDAVRRLLNPDVDWWFHGPRAHQHLVLMRLLTGGGGGAAGLPFKVRGVDAFGETVLAEGTDATGKLYWVHAWTVGPGGRVTGVREYCNTALVVTRLGGGGGGKGAEAAAPCSRSQSEQLWQSRLPDRARKNLPALVLAI

SEQ ID NO: 243 - DNA, 877 bp, Oryza sativa
cctcccaaccacaatctccctccttcacttggtttcttgttgtgcaactctcgtcgtctcgttcatccccgggctggcatcgcaggagctggcgtctcgacaggatcagcagccgcagcagctgctgctgcaccaacaacaacgacaagaagaagaagaagacttggagtcggagcagcagcggaaccagtggttggtgatccggctgtacgaggccatcaacgcccgagaccacaccgccgcgcacgccctcctcgccccggacctcgagtggtggtaccatggcccacccgccagccaccacatgatgcgcctcctcaccggctgcgcctcgccctcctcttcctccttccgcttccgcccgctctccgtccacgccctcccggcctccgacgtcgtcatcgccgagggcatcaccggccgctaccacgacagctactgggtgcacgcttggaccgtgggacccggccccaatggggatagggtcatcacccacctccgcgagtacctcaacaccgatctcaccgtcacccgcctcccgcccacccgctgcctctggcagagccgccgccccgacctcccggccctcctcctcgccctctaattcatcatcttattgtgattaccatcaatcagcttcaaccaatcccctccattctgctgttccaatacgtcgatcacacctagtacgcgtaattacagtattatttgcaattagtatataataagaaatgtggcctcctttacttcacttttactgcgtctgcgtcttcgtcagcggtgacgctctcgccgcttccgcagctactactgttcaaataatgtctcttgtatggttgaacaataataaagcagctttgcattctcatcttactgt

SEQ ID NO: 244 - protein, 99 aa, Oryza sativa
MMRLLTGCASPSSSSFRFRPLSVHALPASDVVIAEGITGRYHDSYWVHAWTVGPGPNGDRVITHLREYLNTDLTVTRLPPTRCLWQSRRPDLPALLLAL

SEQ ID NO: 245 - DNA, 594 bp, Phaseolus coccineus
gttccccaaaacagaggaagccagtttcccattaacccagaaatgaagcacatagcaagctccattgaaatttcaaagatggaagctgagaggaaccagaaggaggaaatgcagaatagggcaacagtggaaacactctacaaggccctgttgggtgaaggccaaatggacacagtggcaaacatgctagcaagtgaccttgagtggtggttccatggccccccacagtgccaacacatgatgagggtgctcactggggaaactgccctcaacaatggcttccggttcgagccaaggagcctcaccgccatcggcgactgcgtgatcgccgaagggtggaaaggaaaggcctactgggtgcacgtttggacagtcaagaatggcaccatcacacagttccaagagtacttcaacacatggctcgtggtcagagacttgaggtcacaaacatggaaaaaaaggcttgaaaacatgacattgtggcaaagccagccccgtgatctctatcgccgatccttgccgggacttgtcttacccatttagctataagggaaagaaatacatactcctgtagctctgaaaatttattgtatg

SEQ ID NO: 246 - protein, 166 aa, Phaseolus coccineus
MKHIASSIEISKMEAERNQKEEMQNRATVETLYKALLGEGQMDTVANMLASDLEWWFHGPPQCQHMMRVLTGETALNNGFRFEPRSLTAIGDCVIAEGWKGKAYWVHVWTVKNGTITQFQEYFNTWLVVRDLRSQTWKKRLENMTLWQSQPRDLYRRSLPGLVLPI

SEQ ID NO: 247 - DNA, 758 bp, Picea glauca
ggactattactacaacgagatatattgagataacttggggtataagaccagtctcacagttcaggcacatcagcgtcggccgtaccggcttcattcccattaacacaaacacatcgatacgaaatcaacaaaacccaagaaaactatgaaacctaaaaccaacatgcacctacacaactttctgtaaaacccaatctaatcaacaccatcggcatgaatatataattaaatggcaaggacgaggccgggcatggatttctccttagatttcacagcgctgctctcccacataggggaacacaactgtctctgccgaagaagtgaagggttgaagtccgttacagtgattgttgtgttgaaatactctcgaacttcagtgattatcccattttctagagtccagacgtgaacccagtattgggattcgtcctcgcgaccttcaacgaacaccttgttaccgacagcagtaacggactgaggtgtgaaggtgaaagagtgggaagagtagggttcacccgtgagcatacgcattaagtattgatagcaaggtggtccgtggaaccaccaatctaagtcgggggccaaaatcctctccacagtttcggcatctctcaaccccaacgcagcgtagagctcgcgaaccacctttatatattcttctccctccactgtgctctccgcatagtttggattagccagctctgaacaatgaaatcaaaaatatgagcgagacgatgaagatgatcaaagatagaagc

SEQ ID NO: 248 - protein, 101 aa, Picea glauca
MRMLTGEPYSSHSFTFTPQSVTAVGNKVFVEGREDESQYWVHVWTLENGIITEVREYFNTTITVTDFNPSLLRQRQLCSPMWESSAVKSKEKSMPGLVLAI

SEQ ID NO: 249 - DNA, 1067 bp, Picea glauca
atcataacaatccattgaaattaaatcaaaacgatccatgaacattaatattaaatcgaaacgacataacagacacataggtgtatacgactgatcggatgaaatccggggtaacagacacgtagatgtacgccactgatcggatgaaatccgagggaacagacacatagatgtatacgactgatcgaatgaaatccgagggatacaaatcataaggagatttgatctaaatctacatatatttcggacagatctggcagccataataccagtacaacacagaacagacagaaacccaaaaactataagcagactacatctctaccagacgcccagacccgcaaatagtctacatcccatccactggatctggcaatttattcagctatataagtttattcaacagatactgatttgcttatataatttagatcgccaggaggaggccgggcatggaattgtcgtcagagtgtccaagctcgctctgccagatgagagagcaacccagatgctttcgtcccaccgacgaagacgccgacgagggcttgaaatccgtcacgacaagagacgtgttaaaatactctcgaacttctgtaactatcccatcctcgtccacagtccagacgtgaatccagtaaacggattcgtcctcgtgaccttccacaaccaccttgttgccgagcgcggtgactgattggggggtaaacgaaaattgtttaatctgcgtagaaatgccagtgagaacagacatcaaacagtgccggtacgctggtgggccgtgaaaccaccactccaggtcgggggccaaaatcctctgcactgtctctgcatcgcctgtgtccagcgcctcgtagagccgccgcaccaccgcctgcggtgctgctgggatggggattgaactagccagctcttaacgaaacttgaggggaatcgaacccgagacgcggactgtaggagagattcgacccgctgattaaacgggatagaataggatttgagaaacgggaacaaagagaaagagaaatgaaacgaggcaaatcgaggaaatgaaataaaatagagcggag

SEQ ID NO: 250 - protein, 107 aa, Picea glauca
MSVLTGISTQIKQFSFTPQSVTALGNKVVVEGHEDESVYWIHVWTVDEDGIVTEVREYFNTSLVVTDFKPSSASSSVGRKHLGCSLIWQSELGHSDDNSMPGLLLAI

SEQ ID NO: 251 - DNA, 336 bp, Physcomitrella patens
atgagcaagctgctgacaggaatcatctcatttcgatctgttaccctgattccgtcgagcattcttgctactcacaatattgtgattgttgagggcgaaagtttttgccaagaggttgcgtgggtgcacatatggacagtcaaggaaggcaaactggttcagctccaggaatactggaacacagctgtctcaatcaactccagtgcttgcttaacttcggactcgtgttgttcgaagcggcaattaccattgcagtccacatctccaattatttggcagagcaaactctggcatgatgtgaataacaccaaacctggacttatcttgactatatga

SEQ ID NO: 252 - protein, 111 aa, Physcomitrella patens
MSKLLTGIISFRSVTLIPSSILATHNIVIVEGESFCQEVAWVHIWTVKEGKLVQLQEYWNTAVSINSSACLTSDSCCSKRQLPLQSTSPIIWQSKLWHDVNNTKPGLILTI

SEQ ID NO: 253 - DNA, 318 bp, Physcomitrella patens
atgaagcttttattaaccgggataacaacatgcaaaacattccatttcacgccaaatgaagtttttttatttggaaatagggtttttgtggaaggttttggaagaacaattaatacttcatgggttcatatatggactatacatcaaaacttatgtgtgatgttgagggagtattttaacaccgcaatcatggtcacaaatgtcacttcctctcaaaaagaacatgatgtgagttatatttggcaaagccatcttgcaaggatccgagacatcaatataccgggggttgttttggcttttgaaataaatacatcataa

SEQ ID NO: 254 - protein, 105 aa, Physcomitrella patens
MKLLLTGITTCKTFHFTPNEVFLFGNRVFVEGFGRTINTSWVHIWTIHQNLCVMLREYFNTAIMVTNVTSSQKEHDVSYIWQSHLARIRDINIPGVVLAFEINTS

SEQ ID NO: 255 - DNA, 348 bp, Physcomitrella patens
atgcgattgctcactggtgttacttcgtgtgacaccttcaccttcaagttgacgggcattcgcggaattggcaacagggttttcgtagaaggtgaagcaccatcagctcgtggaagtatatcaggcctgaagaagcctgtgtactgggtgcacatatggacgctgaaagacggtaaaatcacgcagctgcgagagtatttcaataccgcaatcctggtgacagacttgaaaccgacggcgccaactccacacgagattcagcaccacccatgcgcgtccctgtggcataaccgcctttggaagtccaaggaaggtcgggaactgcctggactgattttggctatctga

SEQ ID NO: 256 - protein, 115 aa, Physcomitrella patens
MRLLTGVTSCDTFTFKLTGIRGIGNRVFVEGEAPSARGSISGLKKPVYWVHIWTLKDGKITQLREYFNTAILVTDLKPTAPTPHEIQHHPCASLWHNRLWKSKEGRELPGLILAI

SEQ ID NO: 257 - DNA, 1092 bp, Pinus pinaster
aattcggcacgaggcctctttggttttttaaactctttttatttttctgtccctgttcccattgatcatcaaatccttttcagtttctttgatcagcggttcgagtctcacccccttccctgcgtttcgggttcgattcccctctagtttctttaagagctggctagttcaaatcccatcccagcagcacccgaggcggtggtgcgtcggctttacgaggcgctggagacaggcgatgcagagacggtgcagaggattttggctcccgacctggagtggtggtttcacggccctcccgctttccggcactgtttgatgtcttttctcactggcaattctacgcagattaagcaatttttgtttacccccgaatctgtgaccgcactgggcaacaaggtggttgttgaaggtcacgaggacgaatccgtttactggattcacgtctggactgttgatgagaatgggatagttacacaagttcgagagtattttaacacgtctcttgttgtgaccgatttcaagccggcctcggcgtctccgtctgtggggcgaaggcaggtggggtgctctctcatctggcagagcgaatttggacactctgacgacaaatccatgcccggcctcctcctggccatctaaatatatataagtaaatcagtatctgttgaataaacttatatgactgaataaattggcagattccagtggataggatgtagcctatctgtgtgggtctgggtgttagcaatgtagtctgcttagagtttttgggcctgtgtctgttttagttcatactgttagatctgtcccaaatatttgtagatcaagtcttgccatgatttgtgtatctgggatttcatctgatcagtggtatacggctatggcgtatacacttatgtgtctgttatgtcggatttcatccgatcaatcgtatacacctatgtatctgttatgtcggatttcatccgatcagtcgtatacacctatgtatctgttatgtcggatttcatccgatcagtcgtttacatgtatgtgtctgtcatatcgtctggctttaatattaatgttaatggatcgttttgttttaatctc

SEQ ID NO: 258 - protein, 107 aa, Pinus pinaster
MSFLTGNSTQIKQFLFTPESVTALGNKVVVEGHEDESVYWIHVWTVDENGIVTQVREYFNTSLVVTDFKPASASPSVGRRQVGCSLIWQSEFGHSDDKSMPGLLLAI

SEQ ID NO: 259 - DNA, 856 bp, Picea sitchensis
gattttctctttctctttgttcccgtttctcaaatcctattctatcccgtttaatcagcgggtcgaatctctcctacagtccgcgtctcgggttcgattcccctcaagtttcgttaagagctggctagttcaatccccatcccagcagcaccggaggcggtggtgcggcggctctacgaggcgctggacacaggcgatgcagagacagtgcagaggattttggcccccgacctggagtggtggtttcacggcccaccagcgtaccggcactgtttgatgtctgttctcactggcatttctacgcagattaaacaattttcgtttaccccccaatcagtcaccgcgctcggcaacaaggtggttgtggaaggtcacgaggacgaatccgtttactggattcacgtctggactgtggacgaggatgggatagttacagaagttcgagagtattttaacacgtctcttgtcgtgacggatttcaagccctcgtcggcgtcttcgtcggtgggacgaaagcatctgggttgctctctcatctggcagagcgagcttggacactctgacgacaattccatgcccggcctcctcctggcgatctaaattatataagcaaatcagtatctgttgaataaacttatatagctgaataaattgccagatccagtggatgggatgtagactatttgcgggtctgggcgtctggtagagatgtagtctgcttatagtttttggggtttctgtctgttctgtgttgtactggtattatggctgccagatctgtccgaaatatatgtagatttagatcaaatctccttatgatttgtatccctcggatttcattcgatcagtcgtatac

SEQ ID NO: 260 - protein, 107 aa, Picea sitchensis; identical to SEQ ID NO: 250

SEQ ID NO: 261 - DNA, 745 bp, Pinus taeda
tacattacactgtgcgtttgcgttttagatctggcgaagacgaatatatcgagggcgcctgaggaagagaacaagggggtcgtgtggcggctgtacgaggcgctgagcacaggagatgcagaaacggtgcagaggattttggccccgaacttggagtggtggttccacggccccccctcctgccagcacttgatgcgtctgctcaccggccgctccacgcgcactcgtttttccttcgtccccgattccatcaccgtgctcagtcacaacctggtggtggcggaaggtcgcgaggacgaatccgtgtactgggttcacgtctggagtctggacaatgcaggcttcacagtcactcacctcagagaatatttcaacacctctctcgttgtaacggagtttaacgcgccttcttcctcttcttcgtcaccgacgttggcggggcaagggcagaggcagcggtgttctgttcccctgtggcagagccagcttatcaaatccgacgctaattccatgcccggtctcgtccttgctgtctgatgataaatatatcacttggcaggcttccctgttccctaagggtgttatacttgcaatattgtgtgggtgttatacttgcaatattgtgtgtttgcaggtttgtctctatactaagagatgtgttttctatagattaacgaggggaacctcaagaccggaggaatatgtagagacatgttataacaaataaatgaggaatatgtagaga

SEQ ID NO: 262 - protein, 114 aa, Pinus taeda
MRLLTGRSTRTRFSFVPDSITVLSHNLVVAEGREDESVYWVHVWSLDNAGFTVTHLREYFNTSLVVTEFNAPSSSSSSPTLAGQGQRQRCSVPLWQSQLIKSDANSMPGLVLAV

SEQ ID NO: 263 - DNA, 834 bp, Pinus taeda
ccatcctaccagcaccggaggcggtagtgcggcggctttatgaggcgctgaagacgggcgatgcagagacggcgcagaggattttggctcccgacctggagtggtggtttcacggccctcccgcttaccgccactgtttgatgtcttttctcaccgccgattctccgcagactaagcaatttttgttttccccccaatccgtgaccgcgttgggcaacaaggtggttgttgaaggtcacgaggaagaatccatttattggattcacgtctggactgtggatgagaatgggatagttacgcaagttcgagagtattttaacacctctcttgttgtgacggatttcaagccgacctcggtgtcttcgtcggtggagcgaaggcaggtgggttgctctctcatctggcagagcgaatatggacactctgacgacaattccatgcccggcgtcttcctggccatctaaatatatatagctaaattagtatctgttgaataaacttatatcactgaataaattggcagattccagtggataggatgtagactatctgtgggtctgggggtggttagcaatgtagtctgcttagagtttttgggtgtgtgtctgtttttgttcgtagtggtagatctgtcccaaatatttgtacatcaagtcttgccatgatttgtatctctgggatttcatctgatggcgtatacacttatgtctgttaggtcggatttcatctgatcagtcgtatacacctatgtgtctgttgggtcggatttcatctgatctgtcgtctacatgcatgtgcctgtcatatcgtttgaatttgatattaatgcaaatg

SEQ ID NO: 264 - protein, 107 aa, Pinus taeda
MSFLTADSPQTKQFLFSPQSVTALGNKVVVEGHEEESIYWIHVWTVDENGIVTQVREYFNTSLVVTDFKPTSVSSSVERRQVGCSLIWQSEYGHSDDNSMPGVFLAI

SEQ ID NO: 265 - DNA, 800 bp, Pinus taeda
attggtttgttcattctccgaatctcccctgctctgctctttgtctttgtctttgtttctgtttcagtttttcgttcgcgttcagagctggcgaagacgaatatattgagggctgccgctgcagtggagaagaagaacaaaaaggtggtaaggcggctgtacgaggcgctggggtcgggcgatgcaaaaacggtgcagaggattttggcccctcacttggagtggtggttccatggccccccctcctgccagcacttgatgcggctgctcaccggccgctgcacgcacactcgtttttccttcgtccccgattccatcaccgcgctcagtcacaacctggtggtggtggaaggtcgcgaggacgaatccgtgtactgggttcacgtctggactctggacaatgcagattgcactgtcactgagctgagagagtacttcaacacctcccttgttgtaacggagttcaacccgccttcttcctcggcctccacgctggaagaaacagagcagattcagaggtgttcggtgcccctgtggcagagcgaactccttaaatccaacgctgattccatgcctggtctcgtcctccctctctgacatcatctatgtaacttttgcagccttccctgtacatctgtgtgttgtgttgtagtagccatgtagtctgtttgtttgcaggtttgtctctctggtcagacatatagtttgtaagaataagaatggtgggacgcctgacgttcacgtgggtacagtccacaaatacgccatgacgttttacaatatgataaatatagttatag

SEQ ID NO: 266 - protein, 112 aa, Pinus taeda
MRLLTGRCTHTRFSFVPDSITALSHNLVVVEGREDESVYWVHVWTLDNADCTVTELREYFNTSLVVTEFNPPSSSASTLEETEQIQRCSVPLWQSELLKSNADSMPGLVLPL

SEQ ID NO: 267 - DNA, 1063 bp, Pinus taeda
gcccattgcattggtcgtttcattgtcctcctaacagcaacaacaatctgccctgctgtttgtttttatttcggtgagaggattgttgattgtttttattccagtgaggggattgttgagaaattgggaacacagcgtactcattgtcaaggaagaaggttgaatgcagaaatcagataacaagaacgtctattctatagaccatctttaatctcatagacgtaaaaatcgcttttctttcaatcgacattacgttcattgtgcctctgttattttagagctggcgaacctaagggcgagagcggtggaggagaagaacaaacgagtggtaaggcggctgtacgaggcactaggaacgggagatgcagagactgtgcaggggattttggcccccgacttggactggcgattccacggcccaccctcttgccagtatttgatgcctctgctcactggcgtttccacgcacactgatttctccttctccccttactccattactgcgctcggccacaatctggtggtggccgaaggtcgcgaggacgaatccgtgtactgggttcacgtctggactctaccgaatgcaggctgcagagtcactgaactcagagaatacttcaacacctccgtcgtcgtaacggagttcaacccgccctcctcttcatcgtcaccttctacgttggcagggcaaacgcagaggcagcgttgttccgttcccctgtggcagagccacctcatcaaatccaactctaattccatgcctggcctcgtcctcgctgtctgatgataaatacatataacttggcagccttccctgttcatgtatgcgttgtagttgtgaagtgatcagtttatttgcatttgtgtgtgttgtaagagatgattttctataaaataacgataaccatgggaagcttggcgttcacgtgggcagagcccacaaatatggaggacgccttcctgctcgtgcttgacatatgtgaagactttttgtaacatataaatatagttataattataattatggtgtgatataaaagctttcacgctggctaatgttttc

SEQ ID NO: 268 - protein, 114 aa, Pinus taeda
MPLLTGVSTHTDFSFSPYSITALGHNLVVAEGREDESVYWVHVWTLPNAGCRVTELREYFNTSVVVTEFNPPSSSSSPSTLAGQTQRQRCSVPLWQSHLIKSNSNSMPGLVLAV

SEQ ID NO: 269 - DNA, 810 bp, Pinus taeda
tgccgaattcggcacgaggcctttcaccagttcttgttcacgatttctccgctcgttctgcttcttctctactgaatattgcaaagcataagctgcagccctggaggtggaagagcagaaaaggtcattggcggttgtgcgtcggctctacgctgcgctggcgtcgggagatgcacagacggtggaaaaaatcgtgacatccgacttggagtggcgattccacggccccccgtcctgtcaacatctcatgcgaattctcactggccaccatgagtcttcattcacctttgttccccactccatcactgcactcggctacaacatggtggtggcggaaggtcgcgaggacgaatccgtgtactgggttcatgtctggactctggacaatgcgggctgcacaatcactcagctcagagaatacttcaacacctctctcgttgtaacagagttcaaggcgccttcttcatcttctttgctttgtcagaaacaaccgtgcttgcagtcgcctctatggcagagcaagattgagaaatcgaagcagaagtgcatgccaggctttgtcctggcaatttgagttaaacttatttgatgtgtttttcgaggcttcgaatttcaaatttatctcgcttgtacaatggaaatgaagataatttcttttggaaatttgatgaagataatttgtttgggaactttcatatatccttttatagtttatatagattccaaggtaggcctgcaagaagtgatatttggaagaaaaatattctatgtacagtaactcattacttcagttttataatacccaaaatt

SEQ ID NO: 270 - protein, 108 aa, Pinus taeda
MRILTGHHESSFTFVPHSITALGYNMVVAEGREDESVYWVHVWTLDNAGCTITQLREYFNTSLVVTEFKAPSSSSLLCQKQPCLQSPLWQSKIEKSKQKCMPGFVLAI

SEQ ID NO: 271 - DNA, 1037 bp, Pinus taeda
gcctctttcgctcattcttttcttcgttttccctctttttatttgtctttgtccctgttcccattcatcaaatcctttcctatttctctgatcaacggttcgagtcttacccccttccctgcgtttcgggttcgattcccctctagtttctttaagatctggctagttcaaatcccatcctagcagcaccggaggcggtggtgcggcggctttacgaggcgctggagacgggcgatgcagagacggtgcagaggattttggctcccgacctggattggtggtttcacggccctcccgcttttcggcactgtttgatgtcatttttcaccggcaattttacgcagattaagcaattttcgttttccccccaatctgttaccacgctgggaaacaaggtggttgttgaaggccacgaggacgaatccgtttactggattcacgtctggactgtggatgagaatgggatagttacgcaagttcgagagtattttaacacctctcttgttgtgacggatttcaagccggcctcagcgtctctgtcggtggggcgaaggcaggtggggtgctctctcatctggcagagcgggtttagacactctgacgacaaatccatgcccggcctcctcctggctatctaaatatatataagtatagatctgttgaataaatttatatagcggaataaattggcagattccagtggataggatgtagcctatctgtgggtctgggtgtctttagcaatgaagtatgcttagagtttttgggtttgtgtctgttttagttcatactggtagatctgtcccaaatatttgtcgatcaaatcttgccatgatttgtatttctgggatttcatctgatcagtcgtatgcagctatggcgtatacacttatgtgtctgttatgttggatttcatccgatcagtcgtatacacctatgtgtctcttatgtcggatttcctccgatcagtcgtttacatgtatgtatctgtcgtatcgtttggctttaatattaatgttaatggatcgttttgtttt

SEQ ID NO: 272 - protein, 107 aa, Pinus taeda
MSFFTGNFTQIKQFSFSPQSVTTLGNKVVVEGHEDESVYWIHVWTVDENGIVTQVREYFNTSLVVTDFKPASASLSVGRRQVGCSLIWQSGFRHSDDKSMPGLLLAI

SEQ ID NO: 273 - DNA, 596 bp, Populus trichocarpa
ttactaaattcaaatccaggatacaacaccatgtctgccaatgccattgaatcccctatgccggaatcctttttgaaagtagaaatgcaaaacaagggcattgttgatgcactgtataagggattatcaaatggtcacacggggacagtggccaaactcatagcaagtgatctagaatggtggttccatggacctccacgatgccaacacatgatgagaatactcaccggggagtctagccacaccaagttcaagttcgagccaagaagcattgaggtcgtcggtgattgtgtgattgcggagggctgggaaggtgcacaagtttactgggtgcatgtatggaccttgaaagatggtgtgatcacacaatttagagagtacttcaatacatggctcaccgtgaaggatataagcccacatggttgggaaattaggcatgagaaccacaccttgtggcagagccacccaagagaccttttcagccgctcattgcctggccttattctcggtatttaggggctagtacttctgtaacaactgtgacattattgcacgaaagggaaatagacctacaagtaataatacaagaaaactga

SEQ ID NO: 274 - protein, 161 aa, Populus trichocarpa
MSANAIESPMPESFLKVEMQNKGIVDALYKGLSNGHTGTVAKLIASDLEWWFHGPPRCQHMMRILTGESSHTKFKFEPRSIEVVGDCVIAEGWEGAQVYWVHVWTLKDGVITQFREYFNTWLTVKDISPHGWEIRHENHTLWQSHPRDLFSRSLPGLILGI

SEQ ID NO: 275 - DNA, 740 bp, Populus trichocarpa
tttattttgactgatagtgacctgttcgttgcaacaaattgatgagcaatgcttttttataatgccaactttgtacaaaaaagcaggcttaaacaatgtctgccaatgacgccgtcgtattggccatgccggtatccgatttgaatgcagaaatgcagaacaaggctattgttgatgcactatacaagggattatcaaatggtgagatggagacggtggccagattcattgccagtgacctagaacggtggttccatggacctccaaaatgccaacacatgatgagaatgctcacaggggagtcgagccagaccaagttcaggttcgagccgagaaacatagaggccattggtgattgtgtgatcatagagggctgggagggtgcacaagtttactgggtccatgtatggaccttgaaagatggtgtgatcacacatttgagagagtacttcaatacatggctcacagtgacagatattagcccacatggttggaaaattaggcatgagaaccacaccttgtgggagagccaccctagagacctttttaaccgctcattgcctggccttgtcctgggcatttagggacccagctttcttgtacaaagttggcattataagaaagcattgcttatcaatttgttgcaacgaacaggtcactatcagtcaaaataaaatcattatttgccatccagctgatatcccctatagtgagtcgtattacatggtcatagctgtttc

SEQ ID NO: 276 - protein, 162 aa, Populus trichocarpa
MSANDAVVLAMPVSDLNAEMQNKAIVDALYKGLSNGEMETVARFIASDLERWFHGPPKCQHMMRMLTGESSQTKFRFEPRNIEAIGDCVIIEGWEGAQVYWVHVWTLKDGVITHLREYFNTWLTVTDISPHGWKIRHENHTLWESHPRDLFNRSLPGLVLGI

SEQ ID NO: 277 - DNA, 762 bp, Panicum virgatum
caagggaataataagctggaggagctggcggcgtctactaggagtaataagctggaggaggagcccctcggccgcctcggcgacgacccagcagctgccgagacagaggagcagcgcaacaagttcctggtgctccgcctgtacgaggcgctcaacggccgcgaccacgccgccgtgcaggccctcctcgcccccgacctcgagtggtggttccatggcccgcccaagcaccagcaccacatgatacgcgtgctcaccggcggatcatccaacaacaacaagaagcagaatagtaatttcagcttcgtgccgcgctccgtcgacgccttgggctgcagctcccccgtgatcgccgagggacagggacctgcaggtgtgtactgggtgcacgcctggaccgtgggcccggatgggctcatcacccagctgcgggagtacttcaacaccgacctcaccgtcacccgcctcgccgccgccaccaagtgcaagtgcgtctggcagagccgccgacccgacagggcaacaaactcgctgccaggcctcgtcctcgtcctcgccctctagtctttctttccttcttggcggcttggcccatccctcgtcttctagcgtttatttgttattacgcctgccatcatcacctagctagatccataaccatgaatgatgatgcggcatggtcatcgtcatcctctgtattactactactactacgcttcatcatcaccatcaccaataataaaaacaaaagtactattgtgc

SEQ ID NO: 278 - protein, 107 aa, Panicum virgatum
MIRVLTGGSSNNNKKQNSNFSFVPRSVDALGCSSPVIAEGQGPAGVYWVHAWTVGPDGLITQLREYFNTDLTVTRLAAATKCKCVWQSRRPDRATNSLPGLVLVLAL

SEQ ID NO: 279 - DNA, 1039 bp, Panicum virgatum
ccacgcgtccgtgggattggattggattggattacccaacaaacaagcaacaaggggttgcaaggcaacaaattaagagagatcacccagaccagaatcggaggagctggcggcgtctactaagctggaagaggaggatccggagccggtcggccgcctcggcgaagccccagcagcagcagcagcagcagagaccgagtccgaggagcagcgcaacaagttcctggtgctccgcctgtacgaggcgctccacggccgcgaccacgccgccgtgcaggccctcctcgcccccgacctcgagtggtggttccatggcccgcccaagcaccagcaccacatgatgcgcgtgctcaccggcgccggagccggatccaacaacaataatttcagctttgtgccgcgctccgtcgacgccttgggctccaccgtcatcgccgagggacctcccgccgaccagtgccacatcaggaatactaatgtgtactgggtccacgcctggaccgtgggcccggatggggtgatcacccagctgcgcgagtacttcaacaccgacctcaccgtcacccgcctcgccgccgccaccaagtgcaagtgcgtctggcagagccgccgccccgacagggcaacaaactcgctaccaggcctcgtcctcgccctctagccacctccatccatctagcttagctggagtaatttctttttcttaataaagacacgcaacgcatcatcagctagctagatccgatccatgaatgacgaaggtgcggcattgtcatcgtcatcctctgtatcactactatacatatcaccgtattatattcatatattgtgcttcatcatcacctgtaataaaaaacaaaagtgtatattgtgtttaattttattcagcggtatatatatggatcaattgcaaactctgatgcctgcatagcctgcttaattgccatgcggaaaagtcatctatcacaatgtaaagagaaaattttccatcggacgctctgtcgcaatattgagaattcaacaagataacattgattcc

SEQ ID NO: 280 - protein, 107 aa, Panicum virgatum
MMRVLTGAGAGSNNNNFSFVPRSVDALGSTVIAEGPPADQCHIRNTNVYWVHAWTVGPDGVITQLREYFNTDLTVTRLAAATKCKCVWQSRRPDRATNSLPGLVLAL

SEQ ID NO: 281 - DNA, 967 bp, Panicum virgatum
atcatacacacctcaccggcctgacaagagtcaagacaagccaagccccagcgagcaactacatacccccatggccaatggtcctctatataaggacctgccgacctctgctctagcacactccgttaccaagccttcttcttctcctccccggagccttctcctcactcctccgagctggctagcgacaagcgcgacgtcctcggcggcgatgccggcctgtgccttgataacggcgaggtggcggccgtgagcagcaagacggtagtggaggagctgtaccgtgccctggagcgcggcgacgtggacgccgtgccccggctgctgaacccggacgtggactggtggttccacggcccgcgggcgcaccagcacctggtgctcatgcgcctgctcaccggcggcggcggcggcctcccgttcacgatccggtcccttgacgcgttcggggcgaccgtgctggccgagggcaccgacgcgacgggggcgctgtactgggtgcacgcgtggaccgtggggccaggtggccgcgtcaccgaggtgcgcgagtactgcaacaccacgctcgtcgtgacgaggctcggcggcggcggcggtgccggtgccggtgccggggccgacgtcgccgctgctgcggcggagaaggcgaaggcgccgtgctcgcagtcgcagtcggagcaggtgtggcagagccggctgcccgaccaggctcgtcggaacctccctggcctcgtgcttgccatctgatctcatcagatgcgaatcatccatcgtgccttgtggccatcagctctgcatgtttccaatgtggttacagggacataaacgaatcaaatgcctataaaaaagcaaaagaaatcatgtgatatttgtgtgatgcgattcctgctggtgattggtgaacataatttagcagcatgttgattgggctacacatatgaaattagaaatggttttatttaaattt

SEQ ID NO: 282 - protein, 120 aa, Panicum virgatum
MRLLTGGGGGLPFTIRSLDAFGATVLAEGTDATGALYWVHAWTVGPGGRVTEVREYCNTTLVVTRLGGGGGAGAGAGADVAAAAAEKAKAPCSQSQSEQVWQSRLPDQARRNLPGLVLAI

SEQ ID NO: 283 - DNA, 1092 bp, Panicum virgatum
ctgcttgctctccccccgccgagcagcgcttcccgttgcagggtagcctccgcgtttcccgagagaagaggtcgagggagcctgcgcgggggactcgcgtctggagctggctacccaccaccagggtcagggagcggcctcgccgcgcccgcacgaggcggcggagctggccgccctcgtggggacggaggagtcggaggagtcggaggagcagcgcaaccgcttcctggcgctgcgcctctacgaggcgctcaacgcccgcgacgcgcgccgggcgcaggagctgctcgcgcccgacctcgagtggtggttccatggcccccccgcgcgccagcacatgatgcgcctcctcaccggcgccgagaaaggcagcggcggcttcgtcttctccccgcgctccgtcgacgccttcgggtccaccgtcatcgccgagggcgccgacgacgcgcggcagctctactgggtgcacgcctggaccgtgggacccgatggggtgatcacccagctcagggagtacttcaacaccgacctcaccgtcaccctcctctccggcgccgcctccgccaagaacgccgcgattgcagccgctcctccgaagcaggacgccgcgtcttcctcctcctcctcctcttcctccttcgcgccctccgcgggcgcctcctcctccacaggccccaagtgcctgtggcagagccgccgcgccgaccgcgcgcacaagtcgctgccgggcctcgtcctcgccatctgatccgcatcagagacggcaagagcgacctgatcccctccataactaatccaataaaccacccgaaattacatagtattagcgcataaataatctgcaactggtctagccttttatcaggtaatgatcaaagccaatcagtcgttgaaggcgtatgcgtatcagcgtatggtctgaactgaaactgctccgagttgtggggtccgctaccagttgcgttgcttagcgtgtgtgttggattagtagtgtgataagtccaagtcatggactatggtgtgtactgctgccattactactactgtgatggtctattatggtctgatgaaagtgatggtatgttgggcttc

SEQ ID NO: 284 - protein, 136 aa, Panicum virgatum
MMRLLTGAEKGSGGFVFSPRSVDAFGSTVIAEGADDARQLYWVHAWTVGPDGVITQLREYFNTDLTVTLLSGAASAKNAAIAAAPPKQDAASSSSSSSSSFAPSAGASSSTGPKCLWQSRRADRAHKSLPGLVLAI

SEQ ID NO: 285 - DNA, 950 bp, Phaseolus vulgaris
gtttccaattaacccagaaatgaagcacatagcaagctccattgaaatttcagagatggaagctgagaggaaccagaaggaggaaatgcagaacagggaaacagtggaaacactctacaaggccctgttgggtgaaggccaaatggacacagtggcaaacatgctagcaagtgaccttgagtggtggttccatggccccccacagtgccaacacatgatgagggtgctcactggggaaactgccctcaacaatggcttccggttcgagccaaggagcctcaccgccatcggcgactgcgtgatcgccgaagggtgggaaggaaaggcctactgggtccacgtttggacagtcaagaatggcaccatcacacagttccgagagtacttcaacacatggctcgtggtcagagacttgaggtcacaaacatgggaaaaaaggcttgaaaacatgacattgtggcaaagccagccccgtgatctctatcgccgatccttgccgggacttgtcttagccatttagctataagagaaagaaatacatattcctgtagctcggaaaatttattgtatgagcttagatcttcacgtgtgcataattcagatcaatctctactacgtgactcatgttgatattgatcagagctatggagatgtgatagtggcggactatacaataaattttccgtaaggtgaaatttatgtgaggtttgttacttttgtttaattagttgagtgaaaccttcatgaatttgatcaataacagaaagagtcttgaaaagagtattttgctggtatagctctaggtcttggttgaagttcaagaatgtgaagttgtgagatagttggggtataatctttgtagggttgtgaaagttgtggaccacattgagttttcgtacatatttggactgattaattgttcaataaaatgacagtgaagtaaaaactgt

SEQ ID NO: 286 - protein, 166 aa, Phaseolus vulgaris
MKHIASSIEISEMEAERNQKEEMQNRETVETLYKALLGEGQMDTVANMLASDLEWWFHGPPQCQHMMRVLTGETALNNGFRFEPRSLTAIGDCVIAEGWEGKAYWVHVWTVKNGTITQFREYFNTWLVVRDLRSQTWEKRLENMTLWQSQPRDLYRRSLPGLVLAI

SEQ ID NO: 287 - DNA, 420 bp, Sorghum bicolor
atgatgcgcctcctcaccggcgcggaccagcgcgacaaacagaaccgcggcggcggcggcgggttcgtcttctccccgcgctccgtcgacgccttcgggtccaccgtcatcgccgagggcgccgacgacgcgcgccagctctactgggtgcacgcctggaccgtggggcccgacggcgtgatcacccagctcagggagtacttcaacaccgacctcaccgtcaccctcctctccggctccggcgccgtctcctccaccaagaaagctgacattgcaggcgctctgcctaagctacaggacgctgcgtcttcttcttcttcctcctccccctcggcagctgcagggcccaagtgcctgtggcagagccgccgcgccgacagcgcacacaagtcgctgccgggcctcgtcctcgccatctga

SEQ ID NO: 288 - protein, 139 aa, Sorghum bicolor
MMRLLTGADQRDKQNRGGGGGFVFSPRSVDAFGSTVIAEGADDARQLYWVHAWTVGPDGVITQLREYFNTDLTVTLLSGSGAVSSTKKADIAGALPKLQDAASSSSSSSPSAAAGPKCLWQSRRADSAHKSLPGLVLAI

SEQ ID NO: 289 - DNA, 324 bp, Sorghum bicolor
atgatgcgcctcctcaccggcggcggcggcagctctggaggcttccgcttcgtcccgcgctccgtcgacgcgctcgtcgcccccacccccaccacctccaccaccgtcatcgccgagggccacgaggggcggtgctactgggtgcacgcctggaccgtgggcgccgatggggtgatcacccagctccgcgagtacttcaacaccgacctcaccgtcacacgcctcgccgccgtcgccgtcgccgcctccgccaagtgcgtgtggcagagccgccgccccgacagcgccaccaactcgctgccgggcctcctcctcgccctctga

SEQ ID NO: 290 - protein, 107 aa, Sorghum bicolor
MMRLLTGGGGSSGGFRFVPRSVDALVAPTPTTSTTVIAEGHEGRCYWVHAWTVGADGVITQLREYFNTDLTVTRLAAVAVAASAKCVWQSRRPDSATNSLPGLLLAL

SEQ ID NO: 291 - DNA, 744 bp, Sorghum bicolor
atgcttttggaatctactcacatcccaccaattgttcctctatataaggaccaaccgacctctactctagcgcacactccaccagagcaggctacactacttctctcctccctctatcccggagccgttaattcactcacgtcgccgatcgagctggctagcgacaagcgcgacgtcgtcgccgtcggcggcgatgccggcttctgcgctgatgacggcgagccgtcgccggcagtgagcagcaaggcggtggtggaggagctgtaccgcgcgctggagcgcggcgacgtggacgccgtgcgccgcctgctgaacccggacgtggactggtggttccacggcccgcgcgcgcaccagcacctggtgctcatgcgcctgctcaccggcgctggcgccggcgccggcctcccgttcaagatccggtccctggacgccttcgggccgaccgtgctggccgagggcaccgacgtgacgggcgcgctctactgggtgcacgcctggaccgtgggaccccgcggccgcgtaaccgaggtgcgcgagtactgcaacaccgcgctcgtcgtgacgaggctcggcggcggcggcggtggcggtggcggtggcgccgacgccgacgccgcggcggcggcggcggaggaggccaaggcgacgttatcgcggtccccgtcaaagcaggtgtggcagagccggctgctacccgaccgggctcgcaggaacctccctggcctcgtgcttgccatctga

SEQ ID NO: 292 - protein, 247 aa, Sorghum bicolor
MLLESTHIPPIVPLYKDQPTSTLAHTPPEQATLLLSSLYPGAVNSLTSPIELASDKRDVVAVGGDAGFCADDGEPSPAVSSKAVVEELYRALERGDVDAVRRLLNPDVDWWFHGPRAHQHLVLMRLLTGAGAGAGLPFKIRSLDAFGPTVLAEGTDVTGALYWVHAWTVGPRGRVTEVREYCNTALVVTRLGGGGGGGGGGADADAAAAAAEEAKATLSRSPSKQVWQSRLLPDRARRNLPGLVLAI

SEQ ID NO: 293 - DNA, 625 bp, Selaginella lepidophylla
gcttgatcgaatccgctgccgattggactcctcagtttcaagccattcgtcttcgatcgagcgatcatttgatcgagtttcatctctagaatttgcctagggttcttcccgctcccaaaccctagctctcccttctgtgcatgtctcaagtcaaggttctcaaggcgctctacaaggcaattgcgtctggtgatgtaggcggcgtgcagggccttgtcgccccagacatcgagtggtggtttcacggcccagcatcggagcagcatctcatgcgcatgctcacgggagtcgatcctctcggctcgctcgccttcaagccaacgcgtgtctcctgggtccaaccgggagccaagatcatcgccgaaggtctcatcctcccaccccgatcctccaccgtcgtctcctgggttcacgtcttcaccatcgagcgcggcaaaattgtcgagctccgcgagtacttcaacgcctccgttaccgtcacgtccagcagccccgcaacgctgtggcaaagccaggtgactggaacctacatgccgggactcatcgttgcggtgtgagacaacttccgcagcttccaggaatgtagatagatgcgtgtgtgcgtgtttgtttgactagatcgtca

SEQ ID NO: 294 - protein, 138 aa, Selaginella lepidophylla
MSQVKVLKALYKAIASGDVGGVQGLVAPDIEWWFHGPASEQHLMRMLTGVDPLGSLAFKPTRVSWVQPGAKIIAEGLILPPRSSTVVSWVHVFTIERGKIVELREYFNASVTVTSSSPATLWQSQVTGTYMPGLIVAV

SEQ ID NO: 295 - DNA, 471 bp, Selaginella moellendorffii
atgtctcagagcagcgcctctccgattgagagaaatttggggaaagatctggctagcgagcaggagggctacgcggtgctgcgaaatctctaccgggcggtgtcgcagggtgatgtagagatcgtcaaggccctggtggccgcggacatcgagtggtggttccacgggccaagggcggagcagcatctcatgcgcatgctcactggcgcggatcggctgggatcgatcgcgtttagccccagcagggtttgcctcgtccaggacaagttcttggccgagggattcttggacgcctccaagtcgtgctgggttcacgtcttcaccatcaagtcgggcaaggtcgtggagctgcgcgagtacttcaacacctcggtcacggtcacgggcgccggattcttcaccagggatgacccgctgtgggaaagcgagctcacgttgacatccatgcccggattgatcgtcgcggtgtga

SEQ ID NO: 296 - protein, 156 aa, Selaginella moellendorffii
MSQSSASPIERNLGKDLASEQEGYAVLRNLYRAVSQGDVEIVKALVAADIEWWFHGPRAEQHLMRMLTGADRLGSIAFSPSRVCLVQDKFLAEGFLDASKSCWVHVFTIKSGKVVELREYFNTSVTVTGAGFFTRDDPLWESELTLTSMPGLIVAV

SEQ ID NO: 297 - DNA, 888 bp, Saccharum officinarum
  misc_feature (570)..(570): n is a, c, g, or t
  misc_feature (668)..(668): n is a, c, g, or t
ctccgatcgatctgccatctttatctatccaaccccaacccaacccaacaatcaagggagctggcggcgtcttctgcttctaagctggagagagctggagctggaccagtgcgcggcgccaccgccggagagggcgacgacataggcatcgacccgctgccggacgcctcctccgagactccggagcagcgcaacaagttcctggtcctccgcctgtacgaggcgctcaacgcccgggaccacgccgccgtgcagtcgctgctcgcgcccgacctcgagtggtggttccatggcccgcccaagcaccagcacatgatgcgcctcctcaccggcggcagcggcagcggcagcggcttccgcttcgtcccgcgctccgtcgacgcgctcggcgcccccaccagcaccgtcatcgccgaggggcaggagagagggtgctactgggtgcacgcctggaccgtgggcgccgatggggtgatcacccagctccgcgagtacttcaacaccgacctcaccgtcacccgcctcgccgccgtcgccgcctccgccaagtgcgtgtggcagagccgccgncccgacagcgccaccaactccctgccgggaattctcctcgccctctgaacactctgatcaccgtcatcgatccattccccttccctgggaattggatngggattggaattaatcagaaccagatcagatcagattcattcctccacccaagtcgtcgtggtatattggatttttgcttgccccttttctttcacaatcgtcgtcgtggtcgtcttgaattctaccctagtcgggtgtttatccgtacgttcccgatcccctcccacttttgatgtcctgggccacggtgggccccccttttttcacacaaatatcttt

SEQ ID NO: 298 - protein, 101 aa, Saccharum officinarum
MMRLLTGGSGSGSGFRFVPRSVDALGAPTSTVIAEGQERGCYWVHAWTVGADGVITQLREYFNTDLTVTRLAAVAASAKCVWQSRRPDSATNSLPGILLAL

SEQ ID NO: 299 - DNA, 611 bp, Saccharum officinarum
agcgcggcgacgtggacgccgtgcgccgcctgctgaacccggacgtggactggtggttccacggcccgcgcgcgcatcagcacctggtgctcatgcgcctgctcaccggcgccggcggcggcctcccgttcaagatccggtccctggacgccttcgggccgaccgtgctggccgagggcaccgacgcgacgggtgcgctctactgggtgcacgcgtggaccgtgggccccggtggccgcgtcaccgaggtgcgcgagtactgcaataccgcgctcgtcgtgacgaggcttggcggcggtggtggcgccgacgccgctgcggcggcggcggaggaggaggccaaggcgacgttctcgcggtccccgtcaaaacaggtgtggcagagccggctgctccccgaccgggctcgcaggaacctccctggcctcgtgcttgccatctgatcggatcagatgcgaatcatgccatatatgcttctaaactggcgtgtggcttattatgctttctagagactagagatgggctatgcatgtcttcaaaatgtggttacaattggacgtgaatgaatcaaatgcgtcacattaaaaaattgaaattagtcgaagcaaatc

SEQ ID NO: 300 - protein, 116 aa, Saccharum officinarum
MRLLTGAGGGLPFKIRSLDAFGPTVLAEGTDATGALYWVHAWTVGPGGRVTEVREYCNTALVVTRLGGGGGADAAAAAAEEEAKATFSRSPSKQVWQSRLLPDRARRNLPGLVLAI

SEQ ID NO: 301 - DNA, 710 bp, Triticum aestivum
  misc_feature (710)..(710): n is a, c, g, or t
ccacgcgtccgcccaccgtatctcgttgcctctcgccgagacgatcgtcgcgagcagcaagtagttgagatcaagccgccgccgccgccgcagtcttcttcttcgtctccgacaggaggagcggccggagctggctaacctggatcagctggagggcgggttcgcctccgcgcgcgggcacgagaccgaggagcagcgcaacaagttcctcgtgctccgcctctacgaggcgctcaacggccgcgaccacgccgccgtgcactccctcctcgcccccgacctcgagtggtggttccatggcccgcccgcacaccagcacatgatgcgcctcctcaccggctccagctccccgtcctcctcctcctccttccgcttcgagccgcgctccgtggacgccttcggctccaccgtcatcgccgagggcgtctcggccgccggcgaggacaccaaggcggcgtactgggtgcacgcgtggaccgtgggctccgatggggtgatcacccagctccgcgagtacttcaacaccgacctcaccgtcacccgcctcgccgccgccgccgcgtccaagtgcgtctggcagagccgccgccccgaccgcgcccgcaactccctccccggcctcgtcctcgccctctagccgcccaagcccagcccaagccagctggacgacgcccaccacttgggcttgggcgtacgcatgggctgacgtn

SEQ ID NO: 302 - protein, 105 aa, Triticum aestivum
MMRLLTGSSSPSSSSSFRFEPRSVDAFGSTVIAEGVSAAGEDTKAAYWVHAWTVGSDGVITQLREYFNTDLTVTRLAAAAASKCVWQSRRPDRARNSLPGLVLAL

SEQ ID NO: 303 - DNA, 584 bp, Thlaspi caerulescens
  misc_feature (490)..(490): n is a, c, g, or t
  misc_feature (555)..(555): n is a, c, g, or t
aaatgagaaacaaggggaccatagagtcacctgtacagagcgttgcagaaaggcgaggcatcgacggtggcgaaactggtggcgagtgacgtggaatggtggttccatggaccgcaccagtgccagcacatgatgaggctgctaacaggggaagcaccgagcgaggtgtcgttcaggtttgagccaagcagcgtgcaagcggtggtggctggtcatgggtgcgtgatcgcagaaggatgggagggttcgcacgtgtattgggttcacgtgtggaagttgaaagagggagtggtgacagagctaagggagtatttcaacacgtggctcactgtcacggattacagtctcgggccaataggatgggacatgggccgttgtacggtttgggagagcgtacagagggacctggctcgtggttcgttgcccagcttgcttttaactatttaactagtactcctatataagagtatagacagttgttgggtctggnggtttctttactttttatgttataaaagttgcctactcatcactcttgatgcctaagcaactgtnattcaaggataaaaataacttgttcccat

SEQ ID NO: 304 - protein, 105 aa, Thlaspi caerulescens
MMRLLTGEAPSEVSFRFEPSSVQAVVAGHGCVIAEGWEGSHVYWVHVWKLKEGVVTELREYFNTWLTVTDYSLGPIGWDMGRCTVWESVQRDLARGSLPSLLLTI

SEQ ID NO: 305 - DNA, 779 bp, Tortula ruralis
  misc_feature (558)..(558): n is a, c, g, or t
ccgctttcagcaaacacatacatttccacatcgcttgtggaggatacgtttcaccatcttccaccgccgtcctcaaccctggcagaagcaatcgcgccttcctcctcctcgtcgtcgtctgcgctggagcatgccaacgcgaggctggtgcggtcgctgtacgaggcgctagcggcgagcgatgcggggcgcgtaagggagctagtgcacgcggatctggagtggtggttctacgggccgcggcgcgagcagcacatgatgcgcctgctcacgggcgccaccaccagcgacaccttcgcgttccgcctcaccagcgtgcgcgccatcggcagccgcgtgttcgtggagggcgaggccggcaagggcaagtgctgggtgcacatatggacgctcaaggataagcgcgtcacgcagctgcgcgagtacttcaacaccgccatcctcgtgacggacctgcgccaggccgcgcccacgccgcacgaggtccagcaccacccctgcgtcccgctctggcagaaccacctctggaagtccctggagggccgcgaactgcccggnctcatcctcgccatctaaactcgacatgtagctccatccatggcggatccgggttagccagctccgtatacataatcacggcgtcaatttctttctattacatcgttagttctgcggcttggttgcgtgtctcagaaactaaggtttcgttaatactgatgcgactcctggatctactggcttgcaagaacctatatcgcaacattgatggccgggcggga

SEQ ID NO: 306 - protein, 106 aa, Tortula ruralis
MMRLLTGATTSDTFAFRLTSVRAIGSRVFVEGEAGKGKCWVHIWTLKDKRVTQLREYFNTAILVTDLRQAAPTPHEVQHHPCVPLWQNHLWKSLEGRELPGLILAI

SEQ ID NO: 307 - DNA, 636 bp, Triticum turgidum
  misc_feature (582)..(582): n is a, c, g, or t
  misc_feature (621)..(621): n is a, c, g, or t
gaattcggcacgaggatctcgttgcctctcgccgagacgatcgtcgcgagcagcaagtagttgagatcaagccgccgccgccgccgcagtcttcttcttcgtctccgacaggaggagcggccggagctggctaacctggatcagctggagggcgggttcgcctccgcgcgcgggcacgagaccgaggagcagcgcaacaagttcctcgtgctccgcctctacgaggcgctcaacggccgcgaccacgccgccgtccactccctcctcgcccccgacctcgagtggtggttccatggcccgcccgcgcaccagcacatgatgcgcctcctcaccggctccagctccccgtcctcctcctcctccttccgcttcgagccgcgctccgtggacgccttcggctccaccgtcatcgccgagggcgtctcggccgccggcgaggacaccaaggcggcgtactgggtgcacgcgtggaccgtgggctccgatggggtgatcacccagctccgcgagtacttcaacaccgacctcaccgtcacccgcctcgccgccgccgccgcgtccaagtgcgtctggcagagccgncgccccgaccgcgcccgcaacttcctccccggcctcgtnctcgccctctagccg

SEQ ID NO: 308 - protein, 105 aa, Triticum turgidum
MMRLLTGSSSPSSSSSFRFEPRSVDAFGSTVIAEGVSAAGEDTKAAYWVHAWTVGSDGVITQLREYFNTDLTVTRLAAAAASKCVWQSRRPDRARNFLPGLVLAL

SEQ ID NO: 309 - DNA, 1037 bp, Vitis vinifera
atggcaggcaatgatattgagtattcttccatgtctatggaggtagaaagccaagacaaggccaatgtcattgaactctacaatgcattggccaatggcgacactcaaattgtggccgggcttctagccagtgaccttgaatggtggttccatggccctccactatgccaacacatgatgcgggtgctcactggggagtcggtccacacggagttcaagttcgagcctcggagcatcactgccattgacggctgtgtgattgctgaaggctgggaaggagcacaagcatactgggttcatgtgtggactctaaaaaatggcctgattacccagtttcgggagtatttcaacacatggctcactgtgagggatctgagacctgcggagtgggagagccccacgctgtggcagagccagcctcgggaccttgccaaacgctcgctgccaggccttctgcttgccatctagattgatggaacattacatgaaatagacctgcatgcgaaagttgaggaagctgaaactatgatccatcaatcaaaatgtaaaatattcattgtattttgttgcacgtgggctatcaaaatttgaaataaaaaaaaattagaaaggggttgttttataatgatttctttgaaatggcctaccggagatatggctgtttctgagatcacaccaaacactctggtccatattacacacaaagcttgtgtccttttccatccagctgctctacgcgtgcacacgtctctggctctacctgcttacactggcagtgagggccatgtacctgcagagactctagcaagtagagaaagcaatggcatcttggataatgcaggcatggaataaccaatggaagggaaaggttcaaagttctacctgatgtcattaatgggtgctggtgagaatcctaagttcctaacccctgtcagcctaaaaggaagaattagcaaggaaatagagttgtcccataaaacaaaatcttaacaatggatcagggtatcacttccctataaactaatttgttattagca

SEQ ID NO: 310 - protein, 155 aa, Vitis vinifera
MAGNDIEYSSMSMEVESQDKANVIELYNALANGDTQIVAGLLASDLEWWFHGPPLCQHMMRVLTGESVHTEFKFEPRSITAIDGCVIAEGWEGAQAYWVHVWTLKNGLITQFREYFNTWLTVRDLRPAEWESPTLWQSQPRDLAKRSLPGLLLAI

SEQ ID NO: 311 - DNA, 704 bp, Zea mays
atggaccctgcagtccggtccggaattctgcaaaagagcgcgcgtccgggcgccactgccgagggcgacgagataggcatcgacccagcggcggagactccggagcagcgcttcaagctcctggtcctccgcctgtacgaggcgctcaacgcccgggaccacgccgccgtgcagtcgctgctggcgccggacctggagtggtggttccatggcccgcccaagcaccagcagcacatgatgcgcctcctgacaaccaccaccaccaccaccaccggcagcttccgcttcgtgccccgctccgtggacgccctcgccgcctcgtccggcaccgtgatcgccgagggccacgagaggggttgctactgggtgcacgcctggaccgtgggacccgatggggtgatcacccagctccgtgagtacttcaacaccgacctcaccgtcacccgcctcgccgccgccgtcgccgccaagtgcgtctggcagagccgccgccccgacagcgccaccaactccctgccgggactcctgctcgccctctgactctgagggataaataccatctctatctatatacgtatcatccttgtcgtcgtcgtcgtcagtcagtgcaaaccggcgtgtgtatgtatgtatctacctacgtattgtatttgatcccatccatgggcgtatgtcactattatatatatacagtatatctcatc

SEQ ID NO: 312 - protein, 179 aa, Zea mays
MDPAVRSGILQKSARPGATAEGDEIGIDPAAETPEQRFKLLVLRLYEALNARDHAAVQSLLAPDLEWWFHGPPKHQQHMMRLLTTTTTTTTGSFRFVPRSVDALAASSGTVIAEGHERGCYWVHAWTVGPDGVITQLREYFNTDLTVTRLAAAVAAKCVWQSRRPDSATNSLPGLLLAL

SEQ ID NO: 313 - DNA, 1163 bp, Zea mays
gtctgaaccaaaatctcatgatatcttagccccggtctgcgatgcgacggccgacggccatggatggcaatatctctaaatcgcgaggacctatacgctaatctaacgctcagccgcggcgctcttgcgcgctcctacataaacaaccccggcccgcctcgacacacagacacagcagccgtttccactgacagtttctcagaaccacagcctcgatccatcgggggagaggatgggagagcctacgcggcaggagctggcggaggcggcgctcgccggggagtcggcggagcagcgcaaccgcttcctggtgctgcggctgtacgaggcgctcggctcctgcgacgcgcgccgggcgcggaagctgctggcgcccgacctcgagtggtggttccacggcccccccacgcgccagcacatgatgcgcctcctcaccggcgcggaccaccagcgccacatgagcggcggcggcggcggcgggttcgccttctccccgcgctccgtcgacgccttcgggtccaccgtcgtcgcggagggcggcgctgacgacgcgcgccagctctactgggtgcacgcctggaccgtggggcccgacggggtcattacccagctcagggagtacttcaacaccgacctcaccgtcaccctcctcgccggcactgcctccgccaagaaagctgctccgcctaagaagcagcaggacgctgcctcttcttctacctcctcctcctcacccccctcggctgcgtcgtcgtctgcagctgcagggtccaagtgcctgtggcagagccgccgcgccgacagcgcgcacaagtcgctgccgggcctcgtcctcgccatctgagactagagacagcaagatccatctaccctccattataagtttataaccttattacaaaagatcctaaaattcgaaactgttattgcataaataatctggaactgcactagttgtatgtactcggagtcggagtcagtcagtgaagacgtaatgacgatgcgcgtatggactgaactgctcgatcctccgtgttgtgacttgtgaggttcaggtgtcgtgtgtgctgctactgtaatgatcgactgttattgtccgagtctgctggatcatggatgtgatgtgatggtatatcgtggtggttaaataaaagtttcatgat

SEQ ID NO: 314 - protein, 203 aa, Zea mays
MGEPTRQELAEAALAGESAEQRNRFLVLRLYEALGSCDARRARKLLAPDLEWWFHGPPTRQHMMRLLTGADHQRHMSGGGGGGFAFSPRSVDAFGSTVVAEGGADDARQLYWVHAWTVGPDGVITQLREYFNTDLTVTLLAGTASAKKAAPPKKQQDAASSSTSSSSPPSAASSSAAAGSKCLWQSRRADSAHKSLPGLVLAI

SEQ ID NO: 315 - DNA, 1095 bp, Vitis vinifera
caccgcgtcctctgctcctctactcccctctccatccatcgcactcacacggtcacactcacacccccgccgtctagccgtttcagctgcagagcctctcgagcggcgcccgcggcaggagctggctacccctcgaccaggtctgggagcggcgccgccgcgcccgcacgagacggcggagctggacgcggaggcggcgctgggcggggagtcggcggaggagcgcaaccgcttcctggtgctgcggctgtacgaggcgctcaacgcccgcgacgcgcgccgggcgcaggagctgctggcgccggacctcgagtggtggttccatggccctcccgcgcgccagcacatgatgcgcctgctcaccggcgctctggaccaccgcggcttcgtcttctccccgcgctccgtcgacgccttcggctccaccgtcgtcgccgagggcgccgacgacgcgcgccagctctactgggtgcacgcctggaccgtggggccccatggggtgatcacgcagctcagggagtacttcaacaccgacctcacgctcctctccggccagcctgacgtcgttgccgcaggcgctgctccgcctaagcagaaggacgctgcctcctcctcgtcgccctcggtggcggcaccggcagcagggcccaagtgcctgtggcagagccgccgcgccgacagcgcgcacaagtcgctgccgggtctcgtcctcgccatctgactgagactagctagagacaccaagctcgatctgccgccctccattatattatattataaccgtataaaaatcctaaaattccaaaccctctactacttgcataaataatctggaactgcactcagtcagtgaaaacgtgaagacggacgtatgcctatgcactgaactgaactagtccgtgttgtgattcctgtaccagttaattactttagctcgtgccgtgccgtgccgtgtgtgtggaatagtagtgtttgttaagccatgggttgttatgctgtgcgccgccattgctgctactgtaatgctctgctgttatggtctggttctatattgcggttgaataaaagttgcatgagttggagggataagcaatt

SEQ ID NO: 316 - protein, 124 aa, Vitis vinifera
MMRLLTGALDHRGFVFSPRSVDAFGSTVVAEGADDARQLYWVHAWTVGPHGVITQLREYFNTDLTLLSGQPDVVAAGAAPPKQKDAASSSSPSVAAPAAGPKCLWQSRRADSAHKSLPGLVLAI

SEQ ID NO: 317 - protein, 17 aa, Artificial sequence
  motif 1
  VARIANT (3)..(3): / replace = "Gln"
  VARIANT (4)..(4): / replace = "Leu"
  VARIANT (12)..(12): / replace = "Leu"
  VARIANT (15)..(15): / replace = "Thr"
  VARIANT (16)..(16): / replace = "Arg"
  VARIANT (17)..(17): / replace = "Leu" / replace = "Phe"
ITRVREYFNTSVTVRDV

SEQ ID NO: 318 - protein, 15 aa, Artificial sequence
  motif 2
  VARIANT (1)..(1): / replace = "Arg"
  VARIANT (2)..(2): / replace = "Ser"
  VARIANT (3)..(3): / replace = "Ile" / replace = "Val"
  VARIANT (4)..(4): / replace = "Ser"
  VARIANT (6)..(6): / replace = "Ile"
  VARIANT (8)..(8): / replace = "Val"
  VARIANT (10)..(10): / replace = "Thr"
  VARIANT (12)..(12): / replace = "Thr"
  VARIANT (13)..(13): / replace = "Asp"
  VARIANT (15)..(15): / replace = "Gly" / replace = "Ile"
PRAYWVHAWAVEGGR

SEQ ID NO: 319 - protein, 15 aa, Artificial sequence
  motif 3
  VARIANT (1)..(1): / replace = "Ser"
  VARIANT (2)..(2): / replace = "Asn"
  VARIANT (3)..(3): / replace = "Arg"
  VARIANT (4)..(4): / replace = "Val" / replace = "Ala"
  VARIANT (5)..(5): / replace = "Gly"
  VARIANT (6)..(6): / replace = "Lys"
  VARIANT (8)..(8): / replace = "Leu"
  VARIANT (15)..(15): / replace = "Leu"
DDDDDRSVPGLVLAI

SEQ ID NO: 320 - DNA, 3325 bp, Artificial sequence
  expression cassette
aatccgaaaagtttctgcaccgttttcaccccctaactaacaatatagggaacgtgtgctaaatataaaatgagaccttatatatgtagcgctgataactagaactatgcaagaaaaactcatccacctactttagtggcaatcgggctaaataaaaaagagtcgctacactagtttcgttttccttagtaattaagtgggaaaatgaaatcattattgcttagaatatacgttcacatctctgtcatgaagttaaattattcgaggtagccataattgtcatcaaactcttcttgaataaaaaaatctttctagctgaactcaatgggtaaagagagagattttttttaaaaaaatagaatgaagatattctgaacgtattggcaaagatttaaacatataattatataattttatagtttgtgcattcgtcatatcgcacatcattaaggacatgtcttactccatcccaatttttatttagtaattaaagacaattgacttatttttattatttatcttttttcgattagatgcaaggtacttacgcacacactttgtgctcatgtgcatgtgtgagtgcacctcctcaatacacgttcaactagcaacacatctctaatatcactcgcctatttaatacatttaggtagcaatatctgaattcaagcactccaccatcaccagaccacttttaataatatctaaaatacaaaaaataattttacagaatagcatgaaaagtatgaaacgaactatttaggtttttcacatacaaaaaaaaaaagaattttgctcgtgcgcgagcgccaatctcccatattgggcacacaggcaacaacagagtggctgcccacagaacaacccacaaaaaacgatgatctaacggaggacagcaagtccgcaacaaccttttaacagcaggctttgcggccaggagagaggaggagaggcaaagaaaaccaagcatcctcctcctcccatctataaattcctccccccttttcccctctctatataggaggcatccaagccaagaagagggagagcaccaaggacacgcgactagcagaagccgagcgaccgccttcttcgatccatatcttccggtcgagttcttggtcgatctcttccctcctccacctcctcctcacagggtatgtgcccttcggttgttcttggatttattgttctaggttgtgtagtacgggcgttgatgttaggaaaggggatctgtatctgtgatgattcctgttcttggatttgggatagaggggttcttgatgttgcatgttatcggttcggtttgattagtagtatggttttcaatcgtctggagagctctatggaaatgaaatggtttagggtacggaatcttgcgattttgtgagtaccttttgtttgaggtaaaatcagagcaccggtgattttgcttggtgtaataaaagtacggttgtttggtcctcgattctggtagtgatgcttctcgatttgacgaagctatcctttgtttattccctattgaacaaaaataatccaactttgaagacggtcccgttgatgagattgaatgattgattcttaagcctgtccaaaatttcgcagctggcttgtttagatacagtagtccccatcacgaaattcatggaaacagttataatcctcaggaacaggggattccctgttcttccgatttgctttagtcccagaattttttttcccaaatatcttaaaaagtcactttctggttcagttcaatgaattgattgctacaaataatgcttttatagcgttatcctagctgtagttcagttaataggtaatacccctatagtttagtcaggagaagaacttatccgatttctgatctccatttttaattatatgaaatgaactgtagcataagcagtattcatttggattattttttttattagctctcaccccttcattattctgagctgaaagtctggcatgaactgtcctcaattttgttttcaaattcacatcgattatctatgcattatcctcttgtatctacctgtagaagtttctttttggttattccttgactgcttgattacagaaagaaatttatgaagctgtaatcgggatagttatactgcttgttcttatgattcatttcctttgtgcagttcttggtgtagcttgccactttcaccagcaaagttcatttaaatcaactagggatatcacaagtttgtacaaaaaagcaggcttaaacatggccatggagttggaagcggaggaggaggcgatgatgacggcgagggagaacgagaggctggtggagtcgctgtacgcggcggtggcggcgggggacggggcggcggcgtcggccgtgctggcgggcgacgtggactggtggttccacgggccgaggcggtgcgagcacatgcggcggcgcctgaccggggaggccgaggctgcgtcggcgtcgtccttcgtgttcgtgccgcggcaggtggcggcggtggggcgcggcggcgggtgggtggtggcggaagggtgggaggggccacgcgcgtactgggtccacgcctgggccgtcgagggcggccgcatcacccgcctccgcgagtacttcaacacctccgtcaccgtccgggacgtcggcggcggcggccactgccggccgcagctcgacggaggaggagttcgccggcgcgccgccgtgtgctggcagagccaacgtgggcgcggcggcggcgacgacgacgacgacaggtcgctgcctggcctcgtgctcgccatctacacgtgaacccagctttcttgtacaaagtggtgatatcacaagcccgggcggtcttctagggataacagggtaattatatccctctagatcacaagcccgggcggtcttctacgatgattgagtaataatgtgtcacgcatcaccatgggtggcagtgtcagtgtgagcaatgacctgaatgaacaattgaaatgaaaagaaaaaaagtactccatctgttccaaattaaaattcattttaaccttttaataggtttatacaataattgatatatgttttctgtatatgtctaatttgttatcatccgggcggtcttctagggataacagggtaattatatccctctagacaacacacaacaaataagagaaaaaacaaataatattaatttgagaatgaacaaaaggaccatatcattcattaactcttctccatccatttccatttcacagttcgatagcgaaaaccgaataaaaaacacagtaaattacaagcacaacaaatggtacaagaaaaacagttttcccaatgccataatactcgaac

SEQ ID NO: 321 - DNA, 2194 bp, Oryza sativa
aatccgaaaagtttctgcaccgttttcaccccctaactaacaatatagggaacgtgtgctaaatataaaatgagaccttatatatgtagcgctgataactagaactatgcaagaaaaactcatccacctactttagtggcaatcgggctaaataaaaaagagtcgctacactagtttcgttttccttagtaattaagtgggaaaatgaaatcattattgcttagaatatacgttcacatctctgtcatgaagttaaattattcgaggtagccataattgtcatcaaactcttcttgaataaaaaaatctttctagctgaactcaatgggtaaagagagagattttttttaaaaaaatagaatgaagatattctgaacgtattggcaaagatttaaacatataattatataattttatagtttgtgcattcgtcatatcgcacatcattaaggacatgtcttactccatcccaatttttatttagtaattaaagacaattgacttatttttattatttatcttttttcgattagatgcaaggtacttacgcacacactttgtgctcatgtgcatgtgtgagtgcacctcctcaatacacgttcaactagcaacacatctctaatatcactcgcctatttaatacatttaggtagcaatatctgaattcaagcactccaccatcaccagaccacttttaataatatctaaaatacaaaaaataattttacagaatagcatgaaaagtatgaaacgaactatttaggtttttcacatacaaaaaaaaaaagaattttgctcgtgcgcgagcgccaatctcccatattgggcacacaggcaacaacagagtggctgcccacagaacaacccacaaaaaacgatgatctaacggaggacagcaagtccgcaacaaccttttaacagcaggctttgcggccaggagagaggaggagaggcaaagaaaaccaagcatcctccttctcccatctataaattcctccccccttttcccctctctatataggaggcatccaagccaagaagagggagagcaccaaggacacgcgactagcagaagccgagcgaccgccttctcgatccatatcttccggtcgagttcttggtcgatctcttccctcctccacctcctcctcacagggtatgtgcctcccttcggttgttcttggatttattgttctaggttgtgtagtacgggcgttgatgttaggaaaggggatctgtatctgtgatgattcctgttcttggatttgggatagaggggttcttgatgttgcatgttatcggttcggtttgattagtagtatggttttcaatcgtctggagagctctatggaaatgaaatggtttagggatcggaatcttgcgattttgtgagtaccttttgtttgaggtaaaatcagagcaccggtgattttgcttggtgtaataaagtacggttgtttggtcctcgattctggtagtgatgcttctcgatttgacgaagctatcctttgtttattccctattgaacaaaaataatccaactttgaagacggtcccgttgatgagattgaatgattgattcttaagcctgtccaaaatttcgcagctggcttgtttagatacagtagtccccatcacgaaattcatggaaacagttataatcctcaggaacaggggattccctgttcttccgatttgctttagtcccagaattttttttcccaaatatcttaaaaagtcactttctggttcagttcaatgaattgattgctacaaataatgcttttatagcgttatcctagctgtagttcagttaataggtaatacccctatagtttagtcaggagaagaacttatccgatttctgatctccatttttaattatatgaaatgaactgtagcataagcagtattcatttggattattttttttattagctctcaccccttcattattctgagctgaaagtctggcatgaactgtcctcaattttgttttcaaattcacatcgattatctatgcattatcctcttgtatctacctgtagaagtttctttttggttattccttgactgcttgattacagaaagaaatttatgaagctgtaatcgggatagttatactgcttgttcttatgattcatttcctttgtgcagttcttggtgtagcttgccactttcaccagcaaagttc

SEQ ID NO: 322 - DNA, 53 bp, Artificial sequence
  primer: prm15407
ggggacaagtttgtacaaaaaagcaggcttaaacaatggccatggagttggaa

SEQ ID NO: 323 - DNA, 47 bp, Artificial sequence
  primer: prm15408
ggggaccactttgtacaagaaagctgggtcacgtgtcagatggcgag

SEQ ID NO: 324 - DNA, 1173 bp, Populus trichocarpa
atgggtcgtcctcccagtaatggcggtccttcctttcgcttcatgcagtatgaggtcacggagatggacgctattttgcaagaacaccataacatgatgccagctcgtgaggttcttgtatctcttgcagagaagttcagtgagtcttcagagcgaaaagggaagattcaagtgcaaatgaaacaagtttggaattggttccaaaatagacggtatgcaataagggcaaaatcaaataaggccccgatgaagttaaatataacacctatgcctcgcgatgattcagctgctgcgaggagtgtgcctcaacaagcagctgctcctatacctgatgctgtgccagccactacatctgcttcttcagctgctggtgccagaagggcaacttcagaaaactcttatatggaatttgaagccaaatctggtagagatggtgcatggtatgatgtaggaaccttccaatcccatagatacttggacaagggggatccggaagtattggttcggtttgctggttttggacctgatgaagatgagtggcttaatgtttgcaagcatgtcaggcagcgttctctcccttgcgaagcatcggaatgtgttgcagttcttcctggagacctcatactctgttttcaggaaggcaaagatcaggctctgtattttgatgctcatgttcttgatgcacaaagacgaagacatgatgtaagaggttgccgttgtaggtttttggtgcgttatgatcatgaccagtctgaggaaattgtgccactaaggaagatttgtcggaggcctgaaactgattataggctgctacaacttcatgctgcaaatgactcagcagctactgaccagcagaaaactagtgtagatccctccatagcaagtaccctgagggttgctgcttctgccacagaaacaatgctgcagcagcaacataacacaggtgtagcagctccggtttcccaagccaatgtttctcaacctgccaaaacaataattgcggagccaaaagaggctgcaaccctcagtgctgtcgattctggaaatcctagtttcatctccactgctgtgtttcccagcgttacggctaccgctgctgtgttggcgagtggaatggctacgagtaacggccctggtggctctggagagaacatgcagggaattaaattgtag

SEQ ID NO: 325 - protein, 390 aa, Populus trichocarpa
MGRPPSNGGPSFRFMQYEVTEMDAILQEHHNMMPAREVLVSLAEKFSESSERKGKIQVQMKQVWNWFQNRRYAIRAKSNKAPMKLNITPMPRDDSAAARSVPQQAAAPIPDAVPATTSASSAAGARRATSENSYMEFEAKSGRDGAWYDVGTFQSHRYLDKGDPEVLVRFAGFGPDEDEWLNVCKHVRQRSLPCEASECVAVLPGDLILCFQEGKDQALYFDAHVLDAQRRRHDVRGCRCRFLVRYDHDQSEEIVPLRKICRRPETDYRLLQLHAANDSAATDQQKTSVDPSIASTLRVAASATETMLQQQHNTGVAAPVSQANVSQPAKTIIAEPKEAATLSAVDSGNPSFISTAVFPSVTATAAVLASGMATSNGPGGSGENMQGIKL

SEQ ID NO: 326 - DNA, 1140 bp, Aquilegia sp.
atgggtagaccaccacatagtggaggccctgccttccgcttcacagcctctgaggttgctgagatggaagcatgtttacaagaatcaaataatgcagttccaactcgtgaagttttatctacttttgctgataaattcactaattcccctgaacgagctggaaagataattgtattaccaaaacaagtttggaattggtttcaaaataggaggtatgctcaaaaggctaaatcagttaaagctcctggcaaattgagtgtttctcctttgcctcgtgctgctgctgttgctggtgatgattcgattccaattactatcagaaatgttcctaattcaactttaccttttccttcttcagggaggagcgcaatggataacaacgttcaaatggagtttgaagcaaaatcagctagggatggggcatggtatgatgttgctacttttatctctcatagaatgtttgagacagctgatccggaagttcgagttcgatttgctggatttggtgcagaggaagatgagtgggttaatgtgcgcaagcatgtgagacagcggtctctcccttgtgaagcatcagaatgtgttgctgtgcttcctaaggaccttatactctgttttcaggaaggtaaagaccaagctctttactttgacgcacatgtcctcgatgcccaaagacggaggcatgacgtccgtggatgtcgttgcaggttcctagtgcgttatgatcatgatctgtccgaggagattgtgccactcagaaaagtctgccgtcgcccagaaacggattacagattgcatttgctacatgcttcgaaagagcaaggggccatggaactaaaaaacagcgggattattgctccaatcagcacatcgagggacaccagttccactattgaaaagggtcaaaagcaatgtaaacaggaggtaagtgcagaggaggtggttatgacatcaacaccaactcaatctaaagagttcgtggccaaagaaactacttcaaggaccagagacggagagagtaatggtatcaatatggaaaagaaagatgctccaattggtgatgctgccaaagctgttggtgttgcctcaggaactgttacagttgctggcacgggtgagaatatggaactggggaagtag

SEQ ID NO: 327 - protein, 379 aa, Aquilegia sp.
MGRPPHSGGPAFRFTASEVAEMEACLQESNNAVPTREVLSTFADKFTNSPERAGKIIVLPKQVWNWFQNRRYAQKAKSVKAPGKLSVSPLPRAAAVAGDDSIPITIRNVPNSTLPFPSSGRSAMDNNVQMEFEAKSARDGAWYDVATFISHRMFETADPEVRVRFAGFGAEEDEWVNVRKHVRQRSLPCEASECVAVLPKDLILCFQEGKDQALYFDAHVLDAQRRRHDVRGCRCRFLVRYDHDLSEEIVPLRKVCRRPETDYRLHLLHASKEQGAMELKNSGIIAPISTSRDTSSTIEKGQKQCKQEVSAEEVVMTSTPTQSKEFVAKETTSRTRDGESNGINMEKKDAPIGDAAKAVGVASGTVTVAGTGENMELGK

SEQ ID NO: 328 - DNA, 831 bp, Arabidopsis lyrata
atggctgctcccgatgattcctctcactatttcaccgagtttaccttggccgagattagagattcatgctttgtgatcttattatattgctcttcttctgcgaagattgtagacatggagaatctgtataaggagctcggtgatcaatctctccacaaagatttctgtcaaactgttgcttccacttttagctttatgtcttcttccattgtttctcaaagttgttctgtgaatcggaatggaaaatccacggtaacctggaaacagatacagagttggttccaggagaagctgaagcagcaatctcaacccaaattcaaaactttgccatctccccctttgcagattcatgacttatctaatcccagttgttatgctgcaaatgctacctttgttcaaacacgcaaaggtaaagcctctgatttagctgatctggcttttgaggctaaatcagcacgggactacgcgtggtatgacgtatcttcgttccttacttatagagttcttcgcactggtgaattggaagtgcgtgtacgcttttctgggttcgacaaccgacacgatgagtgggtgaacgtcaaaacatcagtgcgtgagcggtctattcctttagaaccatcagagtgtgggagagtgaatattggagacctgcttctatgtttccaagaaagggatgatcaagcattgtactgtgatggtcatgttgtgaatattaagagagggattcatgatcacaggagatgtaactgcgtgtttcttgttcgctacgaccttgacaatacagaggaaccgctgggattagaaaaaatttgccgccgccctgatgagtga

SEQ ID NO: 329 - protein, 276 aa, Arabidopsis lyrata
MAAPDDSSHYFTEFTLAEIRDSCFVILLYCSSSAKIVDMENLYKELGDQSLHKDFCQTVASTFSFMSSSIVSQSCSVNRNGKSTVTWKQIQSWFQEKLKQQSQPKFKTLPSPPLQIHDLSNPSCYAANATFVQTRKGKASDLADLAFEAKSARDYAWYDVSSFLTYRVLRTGELEVRVRFSGFDNRHDEWVNVKTSVRERSIPLEPSECGRVNIGDLLLCFQERDDQALYCDGHVVNIKRGIHDHRRCNCVFLVRYDLDNTEEPLGLEKICRRPDE

SEQ ID NO: 330 - DNA, 1047 bp, Arabidopsis thaliana
atgggtcgacctcccagtaatggcggtccggcgtttcgatttatcctgcctgaggtaacggagatggaagcaattttgctacagcataatacagcaatgccaggtcgacatattcttgaagctcttgctgataagtttagtgaatcacctgagcggaaggggaaagttgttgtgcagttcaagcaaatctggaactggtttcaaaataggcgatatgctttacgagcaaggggaaacaaagctcctgggaagctaaatgtatcttccatgccgcgtatggatttaccaaatcagatgagaagtgtgattcaaccattatcagttcctaaaaccactcatatgactggaaatttacccggcatgacgcctgccccttctggtagtttagttcccggtgtcatgaggagtggttcagacaactcttacttggaatttgaagccaaatctgccagggatggtgcatggtatgatgtgcaagctttcctagctcatagaaacttggagattggtgatccggaagtgcaggttcgatttgcgggtttcgaagttgaagaagatgaatggataaatgtcaaaaagcatgtaagacaacggtctctcccatgtgaagcatcagaatgtgttgcagttcttgctggagatctcgtcctttgtttccaggaaggaaaagatcaagctctttactttgacgccattgttcttgacgcacagagaagaagacatgatgtcagaggttgtcgttgtaggttcttggtgcgttacagccacgaccagtccgaggaaatcgttcccttgaggaagatttgtcggcggcccgagacagattacaggctacaacaacttcacaacgccgtaaacgatttggctaactcaaatcagcatcagatacccgctctagatgcggctgcaaaaacccctctgtcactacccggagctacagttcccattgttgcacccgagtcaaaagatccgagcctgagtgccactccagccactttggttcagcctagctccaatgcagctactgttcccgctggttcagcctag

SEQ ID NO: 331 - protein, 348 aa, Arabidopsis thaliana
MGRPPSNGGPAFRFILPEVTEMEAILLQHNTAMPGRHILEALADKFSESPERKGKVVVQFKQIWNWFQNRRYALRARGNKAPGKLNVSSMPRMDLPNQMRSVIQPLSVPKTTHMTGNLPGMTPAPSGSLVPGVMRSGSDNSYLEFEAKSARDGAWYDVQAFLAHRNLEIGDPEVQVRFAGFEVEEDEWINVKKHVRQRSLPCEASECVAVLAGDLVLCFQEGKDQALYFDAIVLDAQRRRHDVRGCRCRFLVRYSHDQSEEIVPLRKICRRPETDYRLQQLHNAVNDLANSNQHQIPALDAAAKTPLSLPGATVPIVAPESKDPSLSATPATLVQPSSNAATVPAGSA

SEQ ID NO: 332 - DNA, 1050 bp, Arabidopsis thaliana
atgggtcgacctcccagtaatggcggtccggcgtttcgatttatcctgcctgaggtaacggagatggaagcaattttgctacagcataatacagcaatgccaggtcgacatattcttgaagctcttgctgataagtttagtgaatcacctgagcggaaggggaaagttgttgtgcagttcaagcaaatctggaactggtttcaaaataggcgatatgctttacgagcaaggggaaacaaagctcctgggaagctaaatgtatcttccatgccgcgtatggatttaccaaatcagatgagaagtgtgattcaaccattatcagttcctaaaaccactcatatgactggaaatttacccggcatgacgcctgccccttctggtagtttagttcccggtgtcatgaggagtggttcagacaactcttacttggaatttgaagccaaatctgccagggatggtgcatggtatgatgtgcaagctttcctagctcatagaaacttggagattggtgatccggaagtgcaggttcgatttgcgggtttcgaagttgaagaagatgaatggataaatgtcaaaaagcatgtaagacaacggtctctcccatgtgaagcatcagaatgtgttgcagttcttgctggagatctcgtcctttgtttccaggaaggaaaagatcaagctctttactttgacgccattgttcttgacgcacagagaagaagacatgatgtcagaggttgtcgttgtaggttcttggtgcgttacagccacgaccagtccgagcaggaaatcgttcccttgaggaagatttgtcggcggcccgagacagattacaggctacaacaacttcacaacgccgtaaacgatttggctaactcaaatcagcatcagatacccgctctagatgcggctgcaaaaacccctctgtcactacccggagctacagttcccattgttgcacccgagtcaaaagatccgagcctgagtgccactccagccactttggttcagcctagctccaatgcagctactgttcccgctggttcagcctag

SEQ ID NO: 333 - protein, 349 aa, Arabidopsis thaliana
MGRPPSNGGPAFRFILPEVTEMEAILLQHNTAMPGRHILEALADKFSESPERKGKVVVQFKQIWNWFQNRRYALRARGNKAPGKLNVSSMPRMDLPNQMRSVIQPLSVPKTTHMTGNLPGMTPAPSGSLVPGVMRSGSDNSYLEFEAKSARDGAWYDVQAFLAHRNLEIGDPEVQVRFAGFEVEEDEWINVKKHVRQRSLPCEASECVAVLAGDLVLCFQEGKDQALYFDAIVLDAQRRRHDVRGCRCRFLVRYSHDQSEQEIVPLRKICRRPETDYRLQQLHNAVNDLANSNQHQIPALDAAAKTPLSLPGATVPIVAPESKDPSLSATPATLVQPSSNAATVPAGSA

SEQ ID NO: 334 - DNA, 759 bp, Arabidopsis thaliana
atggctgcttccgatgattcctctcactatttcaccgagtttaccttgtctgagattgtagacatggagaatctgtataaggagctcggtgaccaatctctccacaaagatttctgtcaaactgttgcctctacttttagttgttctgtgaatcggaatggcaaatcctctataacctggaaacaggtacagatttggttccaggagaagctgaagcatcaaagccaaccaaaatccaaaactttgccatctccccctttgcagattcatgacttatctaatcccagttcttatgcttcaaatgcctcaaatgctacctttgttgggaattctacctttgttcaaacacgaaaaggcaaggcctctgatttagctgatctggcttttgaggctaaatcagcgcgggactacgcgtggtatgacgtgtcttcgttccttacttatagagttcttcgcactggtgaactggaagtgcgtgtacggttttctgggttcgacaaccgacacgatgagtgggtaaacgtcaaaacatcagtgcgtgagcggtctattcctgtagaaccatcagagtgtgggagagtgaacgttggagacctgcttctatgtttccaagaaagagaggatcaagcactctactgtgatggtcatgttttgaatatcaagagagggattcatgatcacgcgagatgtaactgcgtgtttcttgttcgctacgagcttgacaatacagagtgtatgttcaggaatcgctgggactag

SEQ ID NO: 335 - protein, 252 aa, Arabidopsis thaliana
MAASDDSSHYFTEFTLSEIVDMENLYKELGDQSLHKDFCQTVASTFSCSVNRNGKSSITWKQVQIWFQEKLKHQSQPKSKTLPSPPLQIHDLSNPSSYASNASNATFVGNSTFVQTRKGKASDLADLAFEAKSARDYAWYDVSSFLTYRVLRTGELEVRVRFSGFDNRHDEWVNVKTSVRERSIPVEPSECGRVNVGDLLLCFQEREDQALYCDGHVLNIKRGIHDHARCNCVFLVRYELDNTECMFRNRWD

SEQ ID NO: 336 - DNA, 1029 bp, Brassica napus
atgggtcgacctccgagtaatggcagtccagcgttccgattcaacctcgctgaggtaacggagatggaagcagtattgaaacagcataacacagcaatgccaggtcgagatacacttgaagctcttgctgataagtttagtgacactgtggagcgcaaggggaaaactgttgtgcaattcaaacaaatatggaactggttccagaacaggcgatatgctttaagggcaagtagaaacaaagttcctgggaagctgaatgtatcttccatgccgcgcagtgtggatccaacaaacccaatgaggaacgtgcttccaccatcaaccggtcctaaaccccctcatatgattgggaatctatccgggatgacacctgcccctcccgctccaggtgtcatgaggagcggttcagacaattcttacttggaatttgaagccaaatctgccagagatggtgcatggtatgatgtacaagctttcctagctcatagaaacttggagattggtgatccggaagtgcaggttcgatttgcgggttttgaagttgaagaagatgaatggataaacgtcaagagacacgtaaggcaacggtcactcccatgtgaagcatcagaatgtgttgcagttcttgctggagatctcgtgctttgcttccaggaagggaaagatcaagctctttactttgacgccattgttctcgatgcacaaagaaggagacacgatgtcagaggttgtcgctgcaggttcttggtgcgttacagccacgaccagtccgaggaaatcgtccccttgaggaagatttgcaggcggccagagactgattacaggctacagcaactccacagtgctgccaatgactttgctaactccaaacccgctccagatgcggctgcaaaagctcctcttccaccatccaccgcctcagcccccattgttccacctgatgtgaaagatccgagcttgagcgccgcttcagctacttcagctcagcctagctccaatgcagccactgtcccaactggttctgcttag

SEQ ID NO: 337 - protein, 342 aa, Brassica napus
MGRPPSNGSPAFRFNLAEVTEMEAVLKQHNTAMPGRDTLEALADKFSDTVERKGKTVVQFKQIWNWFQNRRYALRASRNKVPGKLNVSSMPRSVDPTNPMRNVLPPSTGPKPPHMIGNLSGMTPAPPAPGVMRSGSDNSYLEFEAKSARDGAWYDVQAFLAHRNLEIGDPEVQVRFAGFEVEEDEWINVKRHVRQRSLPCEASECVAVLAGDLVLCFQEGKDQALYFDAIVLDAQRRRHDVRGCRCRFLVRYSHDQSEEIVPLRKICRRPETDYRLQQLHSAANDFANSKPAPDAAAKAPLPPSTASAPIVPPDVKDPSLSAASATSAQPSSNAATVPTGSA

SEQ ID NO: 338 - DNA, 771 bp, Brassica napus
atggatgctcccgaagattcctcccactatttcaccgatttcacattggccgagattgtagacatggagactctgttcaaggagctcggtgatcaatctctcctcaaagacttctgtcaaactgttgcctcctcttttagttgctcagtgaaccggaagggaaaatcatcaataacatggaaacaagtacagggttggtttcaggggagtttagagaagcaaaaccaaccaaaattcaagactgcgccatcttcccctttgctgattgttgacttatcaaatcccggtggtgtcagagatgctggaagtcctgaaactgttacctatggtcaaagagtgaaaggtaaggcctctgatgtatctgatctcgcttttgaggctaaatctgcaagggatgacgcgtggtatgacgtggcatcgttcatgacttatagatatcttcgcactggtgaactggaagtgcgtgtccggttttctgggttcgacaaccaacacgatgagtgggtgaacgtgcaaacgtcagtgcgtgagcggtctattcctgtagaaccatcagagtgtgggagagtgaaggttggagatctgcttctgtgttttcaggatagggaggatgaagcactgtactgtgatgctcatgttgtgaatatcaagagaggggttcatgatcacaggagttgtaactgcgtgtttgttgttcgctacgagtttgacggtacagaggaaccgctgggacttgaaagtatttgccgtcctcctgattctgaagagtga

SEQ ID NO: 339 - protein, 256 aa, Brassica napus
MDAPEDSSHYFTDFTLAEIVDMETLFKELGDQSLLKDFCQTVASSFSCSVNRKGKSSITWKQVQGWFQGSLEKQNQPKFKTAPSSPLLIVDLSNPGGVRDAGSPETVTYGQRVKGKASDVSDLAFEAKSARDDAWYDVASFMTYRYLRTGELEVRVRFSGFDNQHDEWVNVQTSVRERSIPVEPSECGRVKVGDLLLCFQDREDEALYCDAHVVNIKRGVHDHRSCNCVFVVRYEFDGTEEPLGLESICRPPDSEE

SEQ ID NO: 340 - DNA, 771 bp, Brassica oleracea
atggatgctcccgaagattcctcccactatttcaccgatttcacattggccgagattgtagacatggagactctgttcaaggagctcggtgatcaatctctcctcaaagacttctgtcaaactgttgcctcctcttttagttgctcagtgaatcggaagggaaaatcatcaataacatggaaacaagtacagggttggtttcaggggaggctagagaagcaaaaccaacccaaattcaagactgcgccatcttcccctttgctgattgttgacttatcaaatccaggtggtgtcagagatgctggaagtcctgaaactgttacctatggtcaaagagtgaaaggtaagacctctgatgtatctgatctcgcttttgaggctaaatctgctagggatgacgcgtggtatgacgtggcatcgttcatgacttatagatatctccgcactggtgaactggaagtgcgtgtccgattttccgggttcgacaaccaacacgatgagtgggtgaacgtgcaaacgtcagtgcgggagcggtctattcctgtagaaccatcagagtgtgggagagtgaaggttggagagttgcttctgtgttttcaggatagggaggatgaagcactgtactgtgatgctcatgttgtgaatatcaagagaggggttcatgatcacaggagttgtaactgcgtgtttgttgttcggtacgagtttgacggtacagaggaaacgctgggacttgaaagtatttgccgtcgtcctgattctgaagagtga

SEQ ID NO: 341 - protein, 256 aa, Brassica oleracea
MDAPEDSSHYFTDFTLAEIVDMETLFKELGDQSLLKDFCQTVASSFSCSVNRKGKSSITWKQVQGWFQGRLEKQNQPKFKTAPSSPLLIVDLSNPGGVRDAGSPETVTYGQRVKGKTSDVSDLAFEAKSARDDAWYDVASFMTYRYLRTGELEVRVRFSGFDNQHDEWVNVQTSVRERSIPVEPSECGRVKVGELLLCFQDREDEALYCDAHVVNIKRGVHDHRSCNCVFVVRYEFDGTEETLGLESICRRPDSEE

SEQ ID NO: 342 - DNA, 912 bp, Capsicum annuum
atggctgacttcatggaaacagaagaagaattattggatttcaccttagctgaggctatggaaatgaccaccttgtttaaaggattgaaagataaaccaatcagtcaagatatctgtcaacagcttgcaaccaagtttagttcttcaccatatcgtactggagaatcttcagtaaaatgggaacaggtgcaagcttggtttctggataagctaaaaccaaaagcagataaagcccccgttgatgataatgtagaaccggttgttgttcctaaaaaacgaggaagaaaaccaaaatctgaaaagacaagttcctctcttgtgctttacagaaaaccatacaatacttatggttacacaagactcccagattgtgcatatgacagtcctcaaaggcccaaagtttctgcagcagagatgggcaaagaactctcagggttggcttttgaagctctgtctgcaaaggatttagcttggtatgatgtggcttcatttctcaacttcagagttctttactcgggcgagcttgaagttcgagtaagatttgctggttttggtcatgaagaagatgaatgggtgaatgttaaaaggagagtacgtgaacgttctgttccattagagccatcagaatgtgacaggctgaacgttggagatgccgtgatgtgcttcagggaagatgaatacctcgcagtatatggtgacgctatggttgtggagatccaaaagaatatacatgatgatacaagatgcacatgcatctttgttgtccgctacgacttagataaggctgaggagaaagttgcacttgacaagatatgttgcagaccaaccttcatcaataacaacaacaacatgcccagtgaaattccacaagtggaggctgaggaagatatgatggacgttaactcgtcttag

SEQ ID NO: 343 - protein, 303 aa, Capsicum annuum
MADFMETEEELLDFTLAEAMEMTTLFKGLKDKPISQDICQQLATKFSSSPYRTGESSVKWEQVQAWFLDKLKPKADKAPVDDNVEPVVVPKKRGRKPKSEKTSSSLVLYRKPYNTYGYTRLPDCAYDSPQRPKVSAAEMGKELSGLAFEALSAKDLAWYDVASFLNFRVLYSGELEVRVRFAGFGHEEDEWVNVKRRVRERSVPLEPSECDRLNVGDAVMCFREDEYLAVYGDAMVVEIQKNIHDDTRCTCIFVVRYDLDKAEEKVALDKICCRPTFINNNNNMPSEIPQVEAEEDMMDVNSS

SEQ ID NO: 344 - DNA, 741 bp, Centaurea maculosa
atggagcttcgtcttcgttctagaggagaaaagaaggctttctctggctttacaacacccgagatggagaaaatggagagagttctaaaggaatcaggggaaaatgctctacggccggaggtctttaagaatttgacaagaggattcaaccgttctgcaggtcgtgccggaaaacctcttttaaagtggactgaggtccaaagttggttccttgataggcagcaaggtctcatgtcaaaagatacatcacttactggcacaaacaaattaccggctgcccaagaagcttgtgccttgaatgagacttctgatgtgtctaaaggagagaaagttctcgatatgtcaaagttggaattcgaggcaaagtcaacggatgatgcttggtatgatgtggagacttttattacacacagatttcttagttcaggcgaaccagaagttcttgtgagatatattggttttgggacagaagacgatgaatgggtccgtgtaaaaaacgtgcgtttacgatctgttcccctcgagcactacgaatgcaataaaatcacgatcggagatattgtactttgcttccaagagaaaacagatcaagcaagatactacgatgctcaagttatagatattcaacgcaagttgcatgatatacggggctgcagatgcattttttttcttcgctacgagcatgacaactcagaggaaagtgttgggttgaagagactgtgttaccggccggactattag

SEQ ID NO: 345 - protein, 246 aa, Centaurea maculosa
MELRLRSRGEKKAFSGFTTPEMEKMERVLKESGENALRPEVFKNLTRGFNRSAGRAGKPLLKWTEVQSWFLDRQQGLMSKDTSLTGTNKLPAAQEACALNETSDVSKGEKVLDMSKLEFEAKSTDDAWYDVETFITHRFLSSGEPEVLVRYIGFGTEDDEWVRVKNVRLRSVPLEHYECNKITIGDIVLCFQEKTDQARYYDAQVIDIQRKLHDIRGCRCIFFLRYEHDNSEESVGLKRLCYRPDY

SEQ ID NO: 346 - DNA, 741 bp, Centaurea solstitialis
atggagcttcgtcttcgttctagaggagaaaagaagctcttctctggctttacaacacccgagatggagaaaatggagagagttctaaaggaatcaggggaaaatgctctacggccagaggtcttcaagaatttgacaaaaggattcaaccgttctgcaggtcgtgctggaaaacctcttttaaagtggactgaggtccaaagttggttccttgataggcagcaaggtctcatgtcaaaagatacgtcgcttactggcacaaacaaattaccggctgcccaagaagcttgtgccttgaatgagacttctgatatgtctaaaggagagaaagttctcgatatgtcaaagctggaattcgaggcaaagtcaacggatgacgcttggtatgatgtggagacttttattacacacagatttcttagttcaggcgaacccgaagttcttgtaagatatattggttttgggacagaagacgatgaatgggcccgtgttaaaaatgtgcgtttacgatctgttcccctcgagcactacgaatgcaataaaatcatgatcggagatattgtactttgcttccaagagaaaacagatcaagcaagatactacgatgctcaagttatagatattcaacgcaagctgcatgatatacggggctgcagatgcattttttttcttcgctacgagcatgacaactcagaggaaagtgttgggttgaagagactgtgttaccggccggactattag

SEQ ID NO: 347 - protein, 246 aa, Centaurea solstitialis
MELRLRSRGEKKLFSGFTTPEMEKMERVLKESGENALRPEVFKNLTKGFNRSAGRAGKPLLKWTEVQSWFLDRQQGLMSKDTSLTGTNKLPAAQEACALNETSDMSKGEKVLDMSKLEFEAKSTDDAWYDVETFITHRFLSSGEPEVLVRYIGFGTEDDEWARVKNVRLRSVPLEHYECNKIMIGDIVLCFQEKTDQARYYDAQVIDIQRKLHDIRGCRCIFFLRYEHDNSEESVGLKRLCYRPDY

SEQ ID NO: 348 - DNA, 1113 bp, Fragaria vesca
atgggaaggcctccaagtaacggaggcccttcattccgcttcaatcaggctgaggttgctgagatggaagctattttgcatcaacacaataatacaatgccaacacgcgaacttctaatggaccttgcacagaagttcagtgaaacagcagagcgaaaaggcaaatttcaagtgcaaatgaagcaagtttggaattggtttcaaaataggcgatatgctattagagcaaaatcaagtaaggttcttgggaagttaaatgtttcacctatgcctcgagtggaatcaactccagtgagaactattcctcaaggcccccaacctatagctgcttctatacatgctccttcagttccaagctcagcaagggttccttctgaaaatcctatcttggagtttgaagctaaatccggaagggatgctgcatggtatgatgttgcaaactttttgtctcatagatctttggagagtggtgatccggacgtgctggtgcgttttgctggattcggaccagaggaggatgagtgggttaatgtccgaaagcatgtgaggcagcgctctcttccatgtgaatcatcagagtgtgttgcagttctccctggagacctcatactctgttttcaggaaggtaaagagcaggctttgtattttgatgccaatgtcctcgatgctcaaagacgaagacatgatgtaagaggttgtcgttgtaggtttttagtgcgctatgttcacgatcagtccgaggaaattgttccactgaggaaggtttgccgtcggcctgaaacggattaccggttgcatcagcttcatgctgaaaacaatacaacagcagcagagcagaaaagtacagatcattttaaggtgccttctacttctgctgaaatgatacaaaagcagcacaatccagtttttcatgttaatgcttctgtcgctccccaatcttcaactcctgaacttagaaaacccgagatgagcattgctatgagtgcaggaaatactagtggtcttcctggtagtggtggagtcgccagtggtagtgctcctgtactcacaagctgtactgctacggtcatctctcatggtggttctgttgggaacatgccaggagggaattag

SEQ ID NO: 349 - protein, 370 aa, Fragaria vesca
MGRPPSNGGPSFRFNQAEVAEMEAILHQHNNTMPTRELLMDLAQKFSETAERKGKFQVQMKQVWNWFQNRRYAIRAKSSKVLGKLNVSPMPRVESTPVRTIPQGPQPIAASIHAPSVPSSARVPSENPILEFEAKSGRDAAWYDVANFLSHRSLESGDPDVLVRFAGFGPEEDEWVNVRKHVRQRSLPCESSECVAVLPGDLILCFQEGKEQALYFDANVLDAQRRRHDVRGCRCRFLVRYVHDQSEEIVPLRKVCRRPETDYRLHQLHAENNTTAAEQKSTDHFKVPSTSAEMIQKQHNPVFHVNASVAPQSSTPELRKPEMSIAMSAGNTSGLPGSGGVASGSAPVLTSCTATVISHGGSVGNMPGGN

SEQ ID NO: 350 - DNA, 888 bp, Glycine max
atgggtcgtccacccagtaatgggggcccagcctttcgcttcacccagcctgaggtatcagaaatggaagctattcttcaagaacataacaatgctatgccgtcacgtgatgttcttacagctcttgcagagaaattcagtgaatcacaagatcgtaaaggcaagatttcagtgcagatgaagcaagtttggaattggtttcaaaataagcgatatgcgataagagcaaaatcaagtaagactcctgggaagttaaatattacacccatgcctcgggatgattacaattcaaccccaataaggagtatgcctcaacaaccaacagctgcttcaattcctgctgcttctgctacagttccaacagcagtaaaggcaactacagaaaattcagttatggaatttgaagctaaatctggaagggatggagcatggtatgatgtggctacctttctatcacacagatatttggaaaccagtgatccggaagtgctggtacgatttgctggttttggacctgaggaagatgagtggattaacattcgaaagcatgttaggccacgctcattgccttgtgaatcatcagaatgtgttgtagtcatccctggtgatctcatactttgttttcaggaaggtaaggagcaagccctatactttgatgcccatgtccttgatgctcaaaggagaaggcatgatgtacgaggctgtcgctgtagatttctagttcgttatgatcatgatcagtcagaggaaattgtgccgcttaggaagatttgtcgccggcccgaaaccgattatcggttacagcaacttcatgctgtgaatgaggcagcacctgtggatcagcagaagactggcatggatccagcagcaaattgccaaagcagctga

SEQ ID NO: 351 - protein, 295 aa, Glycine max
MGRPPSNGGPAFRFTQPEVSEMEAILQEHNNAMPSRDVLTALAEKFSESQDRKGKISVQMKQVWNWFQNKRYAIRAKSSKTPGKLNITPMPRDDYNSTPIRSMPQQPTAASIPAASATVPTAVKATTENSVMEFEAKSGRDGAWYDVATFLSHRYLETSDPEVLVRFAGFGPEEDEWINIRKHVRPRSLPCESSECVVVIPGDLILCFQEGKEQALYFDAHVLDAQRRRHDVRGCRCRFLVRYDHDQSEEIVPLRKICRRPETDYRLQQLHAVNEAAPVDQQKTGMDPAANCQSS

SEQ ID NO: 352 - DNA, 1110 bp, Glycine max
atgggtcgtccaccgagtaatgggggcccagcctttcgcttcactcagcctgaggtagcagagatggaagctattcttcaagaacataacaatgcaatgccatcacgtgatgttcttacaactcttgcagagaagttcagtgaatcacaagatcgtaaaggcaagattgcagtgcagatgaagcaagtttggaattggtttcaaaataagcggtatgcgataagagcaaaatcaagtaagactcctgggaagttaaatattacacctatgcctcggggggttccaacagcagtaaaagcaactccagaaaattcagttttggaatttgaagctaaatctggaagggatggagcatggtatgatgtggctacctttctatcacacagatatttagaaacaagtgatccggaagtgctggtacgatttgctggttttggacctgaggaagatgagtggattaacattcgaaagcatgtcaggccacgctctttgccttgtgaatcatcagaatgcgttgtagtcatccctggcgatctcatactttgttttcaggaaggtaaggagcaagccctttactttgatgcccatgtccttgatgctcaaagacgaaggcatgatgtacgaggctgccgttgtagatttctggttcgttatgatcatgatcagtcagaggaaatcgtgccgcttaggaagatttgtcgccggcccgaaaccgattatcgattacagcaacttcatgctgtgaatgaggcagcacctatggatcagcagaaaactgggatggatccagcagcaaatgttaatgccgtaagggctactactactgaaacagcagcaaatgttaatgccgtaagggccactactactgaaacagtgccgaagcagctgattgcagcaaacattcatatggagacagttccagttgtgcaaacaaatgttcctcaacctccacaaagtatggatatgggtgtggatcaaaagaaagctgaaacaaatactgatgttcaagcaggaaattccatcatcaccccaggcagtgtccttactaacatcattactacaagcggtgttcctaaagtctctagtcagactcagaacatggttgaatga

SEQ ID NO: 353 - protein, 369 aa, Glycine max
MGRPPSNGGPAFRFTQPEVAEMEAILQEHNNAMPSRDVLTTLAEKFSESQDRKGKIAVQMKQVWNWFQNKRYAIRAKSSKTPGKLNITPMPRGVPTAVKATPENSVLEFEAKSGRDGAWYDVATFLSHRYLETSDPEVLVRFAGFGPEEDEWINIRKHVRPRSLPCESSECVVVIPGDLILCFQEGKEQALYFDAHVLDAQRRRHDVRGCRCRFLVRYDHDQSEEIVPLRKICRRPETDYRLQQLHAVNEAAPMDQQKTGMDPAANVNAVRATTTETAANVNAVRATTTETVPKQLIAANIHMETVPVVQTNVPQPPQSMDMGVDQKKAETNTDVQAGNSIITPGSVLTNIITTSGVPKVSSQTQNMVE

SEQ ID NO: 354 - DNA, 696 bp, Glycine max
atggaccgcttgcgtcctaggaatcgagcggtcttttctggatttacaaatgccgagattgagaaaatggagaaattgttgagggaacctacgggggggtcattgggcaaggaattttaccaaaaactggctcgaagtttcaactattcctctggccgtgctggcaagcctatcataaaatggacagagattgagagttggtttcagactaggctccaagactcaccacaagtccctagcagtgagttgatggttcctaaatgcaaggaaggagaaactatgcaacacccatcagagttggaatttgaagcaagatcatcaaaagatggagcatggtatgatgttgaggcatttctagctcatagatttcttagcacaggggaagctgaagtccatgtcagatttgttggatttggagctgatgaagatgagtggatcaatatcaaaacttcagtacgccaacgctccattcctttggaaagcacagagtgttccaacctgaaaatgggagacccagtcctgtgcttccaggagaggagagatcaagcaatttactatgatgctcacattgtagagatccaaaggagaatgcatgatattagaggttgcagatgtctcatcttaattcgttatgatcatgacaacagtgaggaaagagttcgcttgaggagactttgccgcagatcaagatcttaa

SEQ ID NO: 355 - protein, 231 aa, Glycine max
MDRLRPRNRAVFSGFTNAEIEKMEKLLREPTGGSLGKEFYQKLARSFNYSSGRAGKPIIKWTEIESWFQTRLQDSPQVPSSELMVPKCKEGETMQHPSELEFEARSSKDGAWYDVEAFLAHRFLSTGEAEVHVRFVGFGADEDEWINIKTSVRQRSIPLESTECSNLKMGDPVLCFQERRDQAIYYDAHIVEIQRRMHDIRGCRCLILIRYDHDNSEERVRLRRLCRRSRS

SEQ ID NO: 356 - DNA, 696 bp, Glycine max
atggaccgcttgcgtcctaggaatcgagcggtcttttctggatttacaaatgccgagattgagaaaatggagaaattgttaagggaacctacagggggatcattgggcagggaattttaccaaaaactggctcgaagtttcaactattcctctggtcgtgctgggaagcctatcataaaatggacagagattgaaagttggtttcagactaggctccaagactcaccacaagtccctagcagtgagttgatggttcctaaatgtaaggaaggagaaactatgcaagacccatcagagttggaatttgaagcaagatcatcaaaagatggagcatggtatgatgttgaggcatttctagctcacagatttcttagcacaggggaagctgaagtccaagtcagatttgttggatttggagctgaggaagatgagtggatcaatatcaaaacttcagtacgtcaacgctctattcctttggaaagcacagagtgttccaacctgaaaattggagacccagtcctgtgcttccaggagaggagagatcaagcaatttactatgacgctcacattgtagagatccaaaagaggatgcatgatattagaggttgcagatgtctcctcttaattcattatgatcatgacaacagtgaggaaagagttcgcttgaggagactttgccgcagaccaagatcttag

SEQ ID NO: 357 - protein, 231 aa, Glycine max
MDRLRPRNRAVFSGFTNAEIEKMEKLLREPTGGSLGREFYQKLARSFNYSSGRAGKPIIKWTEIESWFQTRLQDSPQVPSSELMVPKCKEGETMQDPSELEFEARSSKDGAWYDVEAFLAHRFLSTGEAEVQVRFVGFGAEEDEWINIKTSVRQRSIPLESTECSNLKIGDPVLCFQERRDQAIYYDAHIVEIQKRMHDIRGCRCLLLIHYDHDNSEERVRLRRLCRRPRS

SEQ ID NO: 358 - DNA, 822 bp, Glycine max
atggaaaagctaggtttaactgaatctccattccccaagctctcttcagatgagattctggaattggaaagaatatacgaagacatgggaggaaaagtgctaaatcggaagtcatgcctggagattgctaaacgttttagttcctcatcaaatggtgctggtaaaacttccttatcatggcaacaggtgcggctgtggttcaaaaataatcagagaatgttactgggtaaagatatctcatcttctgacctgctgaaaatatctgctgatcttgcagagtcacctcttttaggaaatggaaaaggtaaacaagctgcagctctcgatgacctgggatttgaagcaagatctacaaaagacattgcatggcatgatgtttcaatgttccttaactacagagttctgagtacaggcgaacttgaagtccgcgtacgatatgctggatttgggaaagagcaggatgagtggatgaatgtgaaattgggggtgcgggagagatctattccattagaaccttcagagtgtcacaaggtgaaggatggagatcttgtactatgtttcctggaaagagaagattatgccctctattgtgatgctcgaattgtaaaaatccataggaagatacatgatccaacagagtgtacgtgcaccttcattgttcgattcgtccatgacaacactgaggaaggagtttcttttgacaggatatgctgtaggcctacacaagaggaatctgcttgctacccagatcttgcccttgatcccacctcaagtccctccttaaatgtcaccctaaataccatagagtccttgtggggataa

SEQ ID NO: 359 - protein, 273 aa, Glycine max
MEKLGLTESPFPKLSSDEILELERIYEDMGGKVLNRKSCLEIAKRFSSSSNGAGKTSLSWQQVRLWFKNNQRMLLGKDISSSDLLKISADLAESPLLGNGKGKQAAALDDLGFEARSTKDIAWHDVSMFLNYRVLSTGELEVRVRYAGFGKEQDEWMNVKLGVRERSIPLEPSECHKVKDGDLVLCFLEREDYALYCDARIVKIHRKIHDPTECTCTFIVRFVHDNTEEGVSFDRICCRPTQEESACYPDLALDPTSSPSLNVTLNTIESLWG

SEQ ID NO: 360 - DNA, 822 bp, Glycine max
atggaaaagctacctttaactgaatatccattccctaagctctctttagatgagattctggaattggaaagaatatacaaagatgtggtaggaaaagtgttcaatcggaagttgtgccaggagattgctaaacgttttagttcctcatcaaatggtgctggtaaaaattccttatcatggcaacaggtgcagctgtggttcagaaatagtcagagaatgttactgggtgaagatatctcatcttctgacctgctgaaaatatctgctgatcttgcagattcacctcttttaggcaatggaaaaggtaaacaagctacagatctcgatgatatgggatttgaagcacgatctacaaaagacaatgcatggcatgatgtttcaatgttccttaactacagagttctgagtacgggcgaacttgaagtccgcgtacgatatgctggatttgggaaagagcaggatgagtggatgaatgtgaaattgggggtacgggagagatctattccattagaaccttcagagtgtcacaaggtgaaggatggagatcttgtactatgtttcctggaaaaagaagattatgccctctattgtgatgctcgaattgtaaaaatccagaggaagatacacgatccaacagactgtacgtgcaccttcattgttcaattcgtccatgacaacactgaggaaggagtttcttttagcaggatatgctgtaggcctacacaagaggaatctgcttgcttcccagatcttgcccttgatcccacccaaagtccctccctaaatttccccctaaataccatagagtccttgtggggataa

SEQ ID NO: 361 - protein, 273 aa, Glycine max
MEKLPLTEYPFPKLSLDEILELERIYKDVVGKVFNRKLCQEIAKRFSSSSNGAGKNSLSWQQVQLWFRNSQRMLLGEDISSSDLLKISADLADSPLLGNGKGKQATDLDDMGFEARSTKDNAWHDVSMFLNYRVLSTGELEVRVRYAGFGKEQDEWMNVKLGVRERSIPLEPSECHKVKDGDLVLCFLEKEDYALYCDARIVKIQRKIHDPTDCTCTFIVQFVHDNTEEGVSFSRICCRPTQEESACFPDLALDPTQSPSLNFPLNTIESLWG

SEQ ID NO: 362 - DNA, 786 bp, Gossypium hirsutum
atggatcgtctacgcctaaggcagagacagagacaaagagcagccttctctgggtttacaaaacccgagatcaagaagatggagaaatttttaatgaaatcaagagagctactgctgagtaaggaattctgtaaaaaaatggctagaaatttcagttcatctgccggtcgtgctggcaaacctattattaaatggaccgaggtacaaagctggttcttagctaggctgcaagaaagcgcatctaaagttccttccttgactgatacctccaaaactgagtccagaatctctgaaacttgccctttagatgatgggcctcaaattcctcagattctcaaagtggtttcgaaaatgggagaaaagatccctgatctatcgggactagagttcgaggcacggtcatctaaagatggagcatggtatgatgtcgatacgtttctcacacaacgacatcccggttctggtgaacctgaagttcttgttagatttgttggatttggggccgatgaggatgaatgggttaatgtaaaaaaggcagtgcgacttcgatccatcccatttcaacattctgaatgtaataaggtgatggtcggagatcttgtattatgcttgcaggagaaaagggaccaattaatctactatgatgttcacgtcaatgaggtcgaaaggaaaacgcatgacataagaggttgcaggtgtatctttttaatccgatacgaccatgacggctctgaggagagagttcgattgagaagactattttatattcgaggccaagaaatctga

SEQ ID NO: 363 - protein, 261 aa, Gossypium hirsutum
MDRLRLRQRQRQRAAFSGFTKPEIKKMEKFLMKSRELLLSKEFCKKMARNFSSSAGRAGKPIIKWTEVQSWFLARLQESASKVPSLTDTSKTESRISETCPLDDGPQIPQILKVVSKMGEKIPDLSGLEFEARSSKDGAWYDVDTFLTQRHPGSGEPEVLVRFVGFGADEDEWVNVKKAVRLRSIPFQHSECNKVMVGDLVLCLQEKRDQLIYYDVHVNEVERKTHDIRGCRCIFLIRYDHDGSEERVRLRRLFYIRGQEI

SEQ ID NO: 364 - DNA, 1074 bp, Hordeum vulgare
atggggcggccgccgagcagcgggggcccagcgttccggttcacgcacgcggaggtggcggagatggaggagcacctgcgtcacctcaacaacgccatcccgcagcgcagcgtcatccagggcctcgccgagaagttcaccgcctccgcctcccgcaccggcaagatccccgtccagtacaagcaggtgtggaactggttccagaaccggaggtactcgcagcgggccaggacccccaggggcgcgccgccgccgcaggggaagatgctgcccacgggggccgaggagcaccacccggcctccttcagggctcaggggtcatcctcttcctaccccggatcccactcaggaaagagtgcttcggatggtggcatggccgagtttgaagcaaagtcagctagagatggcgcgtggtatgatgttgctgcctttctgtcccacaggctctttgaaacgggggacccggaagtaaaagttcgattttctggatttggacctgaggaggatgaatggattaatgttcgtaaatgtgtgaggctgcgttctcttccatgtgaatctgcagaatgtgttgctgtgcttcctggggatctcattctttgttttcaggaaggcaaagagcaggccctctattttgatgctcgtgttcttgatgctcaaaggcgcagacatgatgtaagagggtgccgctgcaggtttcttgttcgttatgatcatgatcactctgaggagattgttcctctgaggaaggtatgccgtcgaccagaaactgatttcaggctccagatcttgcacgcctctagagcggcggcggctgcagatgctcagaatgttagcccacctgagcagaaaccccaaaagccacacaagatgatggacgtgaacactgccgaggtgaccgtggttcccaacccagatcaaggagggccatctgacaagccggctgctcccttaccagctgcgcctactagcatccgcagtgattcagtttcagatgtgcagatggggaatgtagagattattccaaaagttgaagctgcaaatgaagcacaggacgacaagatgagcgtgtga

SEQ ID NO: 365 - protein, 357 aa, Hordeum vulgare
MGRPPSSGGPAFRFTHAEVAEMEEHLRHLNNAIPQRSVIQGLAEKFTASASRTGKIPVQYKQVWNWFQNRRYSQRARTPRGAPPPQGKMLPTGAEEHHPASFRAQGSSSSYPGSHSGKSASDGGMAEFEAKSARDGAWYDVAAFLSHRLFETGDPEVKVRFSGFGPEEDEWINVRKCVRLRSLPCESAECVAVLPGDLILCFQEGKEQALYFDARVLDAQRRRHDVRGCRCRFLVRYDHDHSEEIVPLRKVCRRPETDFRLQILHASRAAAAADAQNVSPPEQKPQKPHKMMDVNTAEVTVVPNPDQGGPSDKPAAPLPAAPTSIRSDSVSDVQMGNVEIIPKVEAANEAQDDKMSV

SEQ ID NO: 366 - DNA, 810 bp, Hordeum vulgare
atggagcgacgatccagcacccgcttctcgccctccgagattgcaaggatggagaagttggtttcagacaaaaaaggggaagtcttggttgatagtttctgccagaagcttgtagaagaatttaatcgttctgcagctcgagtcggaagtagagctctacaggctacacaggttcaaggatggttccttgataagctccctgcatcaactcctaaacctgcttgtttgcctgctacttctgaagaaaagcctttagcctcagaaccagatgcgttagtttctgagataaaggcttcagcttctgaagaaaaaaaaatagctcttgatacaagtatttcaaacaacgaggatgcactttctccggatttacctaaagagactacagataaggttcctgaatttgaagacttgcagtttgaggctaagtcatcaaaggattctgcatggtacgacgttgcccttttcttggcacacaggaagacaagtttgggagaagttgaagtccgggtgaggttcgtcggatatggggctgaagaagatgagtgggtgaatgtcaggaaagctgtccgccagcaatccattccattggaatcctcagaatgccgaagcattgtcaaaggagatcttgtcctgtgtttcaaggagagcaatgatgaagcactgcatttcgatgcgcacattgtggatgtccagtggaaacaacatgatataaggggatgcagatgcctcttcaccgttgaatatgatcatgatcaaagccaggagatggtgaacctcaagaggatctcccggcgaccaagatacctttga

SEQ ID NO: 367 - protein, 269 aa, Hordeum vulgare
MERRSSTRFSPSEIARMEKLVSDKKGEVLVDSFCQKLVEEFNRSAARVGSRALQATQVQGWFLDKLPASTPKPACLPATSEEKPLASEPDALVSEIKASASEEKKIALDTSISNNEDALSPDLPKETTDKVPEFEDLQFEAKSSKDSAWYDVALFLAHRKTSLGEVEVRVRFVGYGAEEDEWVNVRKAVRQQSIPLESSECRSIVKGDLVLCFKESNDEALHFDAHIVDVQWKQHDIRGCRCLFTVEYDHDQSQEMVNLKRISRRPRYL

SEQ ID NO: 368 - DNA, 783 bp, Ipomoea nil
atggatcttcgccccaggcagagacaacacttctctggtttcaccgaagctgagattcagaggatggacttcttacttagggactcaaaagaaaagggtttggaccaagacttctgcaagaaattggcaaaggttttcaaccggtccaaaggtcgtgcaggaaaacctattgtgaagtggacggaggtgcaaaattggtttcagaataggcagcaaaactgcctccaaacagatactccagctgatgccttcaaagtattgcctgatgatgttccagaaccaaaccatccagacaaagcaaaagaaaactctccggttcaaaaagttgtctacatcgctgaaaaagttccagatctgacagagttagaattcgaagctagatcttcaaaagacggggcatggtatgatattgattcttttctctctcacagatatctaagctcaggggatgctgaagttcttgtaagatttattgggttcggggaagaggaagatgaatggataaacattaggaagtcagtccgtgaacgttccattgctttggagcattcagagtgcaacaaagtgaggattggagatcgtgtattgtgctttcaggagaaaaaggagcaagcaagatactttgaagctcaagttactgaaattcaaaagagattgcatgatataagagggtgcagatgcctattcacaattcgatatgttcatgataacaccgaggaaacggttcggttgaggagattgtgtttccggcctagcatactggcccgctcagaggagacttag

SEQ ID NO: 369 - protein, 260 aa, Ipomoea nil
MDLRPRQRQHFSGFTEAEIQRMDFLLRDSKEKGLDQDFCKKLAKVFNRSKGRAGKPIVKWTEVQNWFQNRQQNCLQTDTPADAFKVLPDDVPEPNHPDKAKENSPVQKVVYIAEKVPDLTELEFEARSSKDGAWYDIDSFLSHRYLSSGDAEVLVRFIGFGEEEDEWINIRKSVRERSIALEHSECNKVRIGDRVLCFQEKKEQARYFEAQVTEIQKRLHDIRGCRCLFTIRYVHDNTEETVRLRRLCFRPSILARSEET

SEQ ID NO: 370 - DNA, 714 bp, Lactuca perennis
atggatcatcgtcttcgttctagaggagcaaagaaggtttactctgggttcacaacatccgagatggagaaaatggagaaagtactaaaagaatcaggggaaaatcctctaagtcctgatgtctgtaagatattggcaaaaggattcaatcgttcttcagggcgtgctggaaaacctatcttaaaatggaccgatgtacaaagttggtttattgaaaggcagcaaggtctcatgtcaagaaatacaaataaatcgccagctgtccaatatgttaatgagacttctgatatgtctaaaggagaaaaaattgtagatctttcaaagttggaattcgaggcaaaatcatcagataatgcatggtatgatgtggaagtattcatcacacatagatttatctcaagtggacctcaagttcttgtaagatatgttggatttggaacagaagaggacgaatgggtccatgtgaaaaatgttcgtgaaaggtctattcccattgagcattcagaatgccataaactcatgattggagacattgttctttgtttccaagagaaaacggatcaagcaagatattatgatgctcaagtgatggatattcaaaggaagttgcatgatataagaggctgcagatgcattttcttgattcgatatgaacatgatggatctgaggaaagtgttcggttgaagagactgtgtagccagccggaatattag

SEQ ID NO: 371 - protein, 237 aa, Lactuca perennis
MDHRLRSRGAKKVYSGFTTSEMEKMEKVLKESGENPLSPDVCKILAKGFNRSSGRAGKPILKWTDVQSWFIERQQGLMSRNTNKSPAVQYVNETSDMSKGEKIVDLSKLEFEAKSSDNAWYDVEVFITHRFISSGPQVLVRYVGFGTEEDEWVHVKNVRERSIPIEHSECHKLMIGDIVLCFQEKTDQARYYDAQVMDIQRKLHDIRGCRCIFLIRYEHDGSEESVRLKRLCSQPEY

SEQ ID NO: 372 - DNA, 696 bp, Lotus japonicus
atggaccgtttgcgtcctcggaacggagccaccttttctggattcacaaacgccgagattgagaaaatggacaagttatcaggtgaatcacagggacgatcgttcgaccgcgaattttaccagaagctcactgcatctttcaaccgctcgtctggtcgtgctgggaaacctactgtaaaatggaccgaggtacaaagttggtttcaggctagaattcaagacttaccagaagtccctgaaaataatttggagtcttctcaaggcaaatgtaaggaaggagaaactatccgagacccatcacagttggaatttgaagcgagatcaacaaaagatggagcatggtatgatgttgaggcatttttagcgcaccgatttgttggcacgggagaagctgaagtccgtgtcagatttgtgggatttggagcttcggaagatgagtgggtcaacataaaagattcagtccgagagcgctctgttccttttgaaagcacggactgttcctacctgaatgttggagatcctgtcctgtgcttccaggagaggagagatcaagcaatttactatgatgctcgtatattagagattcaaaggagaatgcatgatattagaggctgcaggtgtctcatcttagttcggtatgatcatgacaacactgaggaaagagttcgcttgaggagactttgtcgcagaccataa

SEQ ID NO: 373 - protein, 231 aa, Lotus japonicus
MDRLRPRNGATFSGFTNAEIEKMDKLSGESQGRSFDREFYQKLTASFNRSSGRAGKPTVKWTEVQSWFQARIQDLPEVPENNLESSQGKCKEGETIRDPSQLEFEARSTKDGAWYDVEAFLAHRFVGTGEAEVRVRFVGFGASEDEWVNIKDSVRERSVPFESTDCSYLNVGDPVLCFQERRDQAIYYDARILEIQRRMHDIRGCRCLILVRYDHDNTEERVRLRRLCRRP

SEQ ID NO: 374 - DNA, 873 bp, Nicotiana tabacum
atgggaagaccgccgagtaacggaggtcctactttccgtttcaacgccactgaggtcgctgagatggaagctatattgcaagcacataatgctacaatgccagctcgtgaagttctcgtagctcttgctgagaagtttagttcttcagcggagagatctggaaaaattatggttcaaatgaaacaagtttggaactggttccaaaatagacgatatgctattagagcaaaaacagctaaggttcctggtaaatttagtaccccgtcagtgcctcaaagtgattcagctatggtaagaactcctgcaaaattgagtgcgtcacctgtgcctcagagtgatccagctgcagtaaggattatgccccaagcttctcaacccatatcttctcctcaagtgaaatcaatgccccaagcgcctcaacctctacctgctccatcagtggcagcacaaaatgtgggcaggagtgcttcagataacattcaaatggagtttgaagctaaatctgcaagagatggtgcatggtatgatgtagcaagcttcctatcacatagatctgtggaaactgctgatccggaagtcctggttcgatttgcggggtttggagcagaggaggatgagtgggtaaatgtatgtaagcacgtaagacagcgatcccttccatgcgaatcgtcagaatgtgttgcagttctccctggtgatctgattctttgcttccaggaaggcaaagagcaggctctgtactttgatgcgcatgtccttgatgctcaaagacgcagacatgatgtgagaggttgccgttgtcggtttctggttcgttatgatcatgatcagtctgaggagattgttcctctgagaaagtttgtcgtcgcctga

SEQ ID NO: 375 - protein, 290 aa, Nicotiana tabacum
MGRPPSNGGPTFRFNATEVAEMEAILQAHNATMPAREVLVALAEKFSSSAERSGKIMVQMKQVWNWFQNRRYAIRAKTAKVPGKFSTPSVPQSDSAMVRTPAKLSASPVPQSDPAAVRIMPQASQPISSPQVKSMPQAPQPLPAPSVAAQNVGRSASDNIQMEFEAKSARDGAWYDVASFLSHRSVETADPEVLVRFAGFGAEEDEWVNVCKHVRQRSLPCESSECVAVLPGDLILCFQEGKEQALYFDAHVLDAQRRRHDVRGCRCRFLVRYDHDQSEEIVPLRKFVVA

SEQ ID NO: 376 - DNA, 768 bp, Nicotiana tabacum
atggaattggaacttcgacccagaaagagacaaattgggtctttctctggtttctcacaaactgagattgagaaaatggagaacttaatcaacgaatcaagtgaacaagtttgtgacccagaattctgcaagaaagtggcaaagacattcatgcgctctcaaggtcgtgcaggaaaaccgattgttaaatggactgaggtccaaacttggtttcagaacaagttgcaatgctgttcatcgaaggataattcagctgaggccaaccaaaaactgcctgacgtcacagaaagatgtgctttagataaagcaaatgaaagctctcatacggcaggccaaaaagttccatcgcaatcagaactagaatttgaggcgaggtcttcaagagatggggcatggtatgatgttgattcatttatctctcaccgatttcttaactctggagaacctgaggctcttgtgagatttgtgagccttggatcggaggaggatgaatgggtaaacataagaaaggcagtccgcgagcgctctgttactcttgaaaattcagagtgtaacaaactgaaggttggagatcttgttttgtgcttccaggagggaaagaaccaatcaaaatatcttgaagctcatgttatagagattcaaaagagattgcatgacataaggggctgcagatgtctctttgtgattcgatatggtcgtgatgacaccgaggaaacagttcgtttgaggcgattgtgtgttcgaccaagcatattagggcgtccttga

SEQ ID NO: 377 - protein, 255 aa, Nicotiana tabacum
MELELRPRKRQIGSFSGFSQTEIEKMENLINESSEQVCDPEFCKKVAKTFMRSQGRAGKPIVKWTEVQTWFQNKLQCCSSKDNSAEANQKLPDVTERCALDKANESSHTAGQKVPSQSELEFEARSSRDGAWYDVDSFISHRFLNSGEPEALVRFVSLGSEEDEWVNIRKAVRERSVTLENSECNKLKVGDLVLCFQEGKNQSKYLEAHVIEIQKRLHDIRGCRCLFVIRYGRDDTEETVRLRRLCVRPSILGRP

SEQ ID NO: 378 - DNA, 900 bp, Nicotiana tabacum
atggatgactccatggaaacagaagaagaattggccgagttcacattagctgaggctatgaaaatgacgaccttgtttaagcgaatgaaagaaaaaccaattagtcaagagttctgtcaaaaacttgcaacaaagtttagttgttcaccttatcgtactggaaaatctttcataaaatgggaacaggtgcaaacttggtttacggatgagcaaaaaacacaagcatctaaagcgattgttgttaagaaagaatctgatgttcctcgacctcgacaagcaaaaaaaccaaaatctaaaaagaaattttcagctctaatgctttccagaaaatacaatacttgcgggtacacaagactccccgaatgtgcatatgaccggcctcagaagcccagagtttctgcagcagagatggccacagagctcgcagagttgtcttttgaagctctttcagcaaaggatttagcttggtatgatgtggcctcatttctcaacttcagagttcttcgcacaggcgagcttgaagttcgtgtaagatttgctggctttggtcatgaagaagatgaatgggtgaatgttaaaaggagagtacgtgaacgttccgttcccttaaagccctcagaatgtgacagggtgaatgttggagatcccttgatgtgcttcagggaagatgaatatctcgcagtatatggtgatgcgcaagttgtggagatccaaaagaaattacacgataatacagaatgcacgtgtatctttgtcgtccgctacgacttggataatgctgaggagaaagttacacttgacaagttatgttgcagaccaaaccgaagcaacagtatactgcctgaaggtcgtgctaaattatgtgtcttgaacagtattgaccaagcaaatactcactag

SEQ ID NO: 379 - protein, 299 aa, Nicotiana tabacum
MDDSMETEEELAEFTLAEAMKMTTLFKRMKEKPISQEFCQKLATKFSCSPYRTGKSFIKWEQVQTWFTDEQKTQASKAIVVKKESDVPRPRQAKKPKSKKKFSALMLSRKYNTCGYTRLPECAYDRPQKPRVSAAEMATELAELSFEALSAKDLAWYDVASFLNFRVLRTGELEVRVRFAGFGHEEDEWVNVKRRVRERSVPLKPSECDRVNVGDPLMCFREDEYLAVYGDAQVVEIQKKLHDNTECTCIFVVRYDLDNAEEKVTLDKLCCRPNRSNSILPEGRAKLCVLNSIDQANTH

SEQ ID NO: 380 - DNA, 834 bp, Ocimum basilicum
atggatgatgagtgtgaggtgatggagggggccaatgatatagctgaattcacatttgcagagataatccaaatggagaacttatttaaggaaatgagagaggaaacagttggtgagcagttctgtcgggagctttctgcaaaatttaattgttcaatccaccgttctggaaagcccccagtaaaatgggaacaggtgcagagttggttccatgacaaacaagcaaatttgggggctgtagttgtgccgaaacccgagaagagaatcgctgcttcaaagactgctatagttaaaaagagggccaaagtgccgactattcctgcaagtgaagctgctgttgagctccatgccttggtttttgaagccagatcagctaaagattatgcttggtttgatgttgcttccttcctcagctacagaatccttcactctggggagatggttgttcgggtgagatttgctgggttcgggaaagaggaagacgaatgggtgagccttaatcgggcggtgcgcgagcggtcaatcccgctggaacattccgaatgcggtagagtgaatgtcggagattccgttctttgcttccgggaaaacgaggatcatgcgctctactgcgatgcacacgtgatagaaatcgagagaaatgttcatgacagcagctgctgcacctgcatttttgtggtttgtttcgaccatgatagtgttgaggcgagggttagggcggagaaattgtgttataggcccaccaaagtggttttgaaagatgagtgcgaagatgggcctaagctcatggagttgccgcccactggaatgcacaacatgctccagctcatgtga

SEQ ID NO: 381 - protein, 277 aa, Ocimum basilicum
MDDECEVMEGANDIAEFTFAEIIQMENLFKEMREETVGEQFCRELSAKFNCSIHRSGKPPVKWEQVQSWFHDKQANLGAVVVPKPEKRIAASKTAIVKKRAKVPTIPASEAAVELHALVFEARSAKDYAWFDVASFLSYRILHSGEMVVRVRFAGFGKEEDEWVSLNRAVRERSIPLEHSECGRVNVGDSVLCFRENEDHALYCDAHVIEIERNVHDSSCCTCIFVVCFDHDSVEARVRAEKLCYRPTKVVLKDECEDGPKLMELPPTGMHNMLQLM

SEQ ID NO: 382 - DNA, 1113 bp, Oryza sativa
atggggcggccgccgagcacggggggcccggcgttccggttcacccaggcggaggtggccgagatggaggcccgcctgcagcagctcaacaacgccatcccgcaccgctccgtcatccaggccctcgccgacaagttcacctcctcccccgcccgctccggcaaggtcgccgtccagcccaagcaggtgtggaactggttccagaaccggaggtactcgcaccgctccaggagctccaggggccccccgacgctgatgcagaccaagatgctgcccacggggtccgacgagcacaagtcgcctcccttcagggctatgccctctgcctctgcgcactccggctcgccctcagggaagggttctttggagagcggccaggttgaatttgaagcaaagtcggctagagatggcgcatggtatgatgttgctgccttcctgtctcatcggttgttcgaatctggtgatccagaagtacgagttcgcttttctggatttggagccgaggaagatgaatggataaatgtccgtaaatgtgtgcggcaacgttctcttccgtgtgaatcaactgaatgtgttgctgttcttcctggagacctcatactttgctttcaggaaggcaaagagcaggctctgtatttcgatgcttgtgtccttgatgctcaaaggcgtagacatgatgtacgagggtgtcgctgtagatttcttgttcgctacgatcatgatcactctgaggaaattgttccactgaggaaggtatgtcgccgaccagaaactgactacaggcttcagattctgcatgctgctagagcagcaggtatggctaaagaggctgtggttgatttggtgtcgcacaatgataagagctcagcggagcagaaacccccaaagcagcacaaaatgatggatgtgaacactgatgaggtaaccatggtttctaaccaagaccaagaagagccaacaggcaagcctgctgctaccttgccagcagcaccggtcaaaaccctgaatgattcagcttcagcttcagcttcagatgtccaaatgggcgaggcacaggctgctccaaaagttgaatcttctgatgaagtagaagacaagatgaaagagggatag

SEQ ID NO: 383 - protein, 370 aa, Oryza sativa
MGRPPSTGGPAFRFTQAEVAEMEARLQQLNNAIPHRSVIQALADKFTSSPARSGKVAVQPKQVWNWFQNRRYSHRSRSSRGPPTLMQTKMLPTGSDEHKSPPFRAMPSASAHSGSPSGKGSLESGQVEFEAKSARDGAWYDVAAFLSHRLFESGDPEVRVRFSGFGAEEDEWINVRKCVRQRSLPCESTECVAVLPGDLILCFQEGKEQALYFDACVLDAQRRRHDVRGCRCRFLVRYDHDHSEEIVPLRKVCRRPETDYRLQILHAARAAGMAKEAVVDLVSHNDKSSAEQKPPKQHKMMDVNTDEVTMVSNQDQEEPTGKPAATLPAAPVKTLNDSASASASDVQMGEAQAAPKVESSDEVEDKMKEG

SEQ ID NO: 384 - DNA, 810 bp, Oryza sativa
atggagcggcgatcgagcgttcgcttcgcgccatccgagattgcaaggatggagaagttggttacacataaaaaggaacaagtcttggatgaaattttctgccggaagctcgcagaagaatttaattgttctccaggccgagttggaagtaaagcactacaggctgtgcaggttcaagaatggttccgtcaaaagttccctgcatcaactgttatacctccttgtttgcctactggctctgaagaaaaggctttagcctcccaagcaagtgcaccggtttctgaagaaaagcctccatcatctgaagaaaatgctttagctgttgatacaagcatttcaaatgatataggcgaggtttcgccggatttacctatagacaacatagataagcttcctgaaattgaagacatgcagttcgaggctaggtcttcaaaggattttgcttggtatgatatcgccactttcttagcatacaggaagttaagttctggtgaatttgaagtccgagtgagatttcaaggatttggggctgaagaggatgaatggatcaatgtccggaaggctatccgcctgcaatccatcccgttggaatcatcagaatgcaaactcatcagggaaggagaccttgtcctctgtttcaaggagagcaatgatgaagcattgcatttcgatgcgcatgttctggaaatccagcggaaacaacatgatataagggggtgcagatgtgtcttccttgtcgaatacgaccatgatggaacccaggagagggtgaacctgagaagattgtcccggcggccaaagcactcctga

SEQ ID NO: 385 - protein, 269 aa, Oryza sativa
MERRSSVRFAPSEIARMEKLVTHKKEQVLDEIFCRKLAEEFNCSPGRVGSKALQAVQVQEWFRQKFPASTVIPPCLPTGSEEKALASQASAPVSEEKPPSSEENALAVDTSISNDIGEVSPDLPIDNIDKLPEIEDMQFEARSSKDFAWYDIATFLAYRKLSSGEFEVRVRFQGFGAEEDEWINVRKAIRLQSIPLESSECKLIREGDLVLCFKESNDEALHFDAHVLEIQRKQHDIRGCRCVFLVEYDHDGTQERVNLRRLSRRPKHS

SEQ ID NO: 386 - DNA, 1146 bp, Panicum virgatum
atgggtcgcccgcccagcaccggcgccccggcgttccgcttcctcccgtccgaggtggcggagatggaggcgcgcctgcagcagctcaacaacgccatccccacccgcgccgtgctccagaccctcgccgacaagttctccgcctcgcccgagcgcgccggcagggtcgccatccagcccaagcaggtgtggaactggttccagaacaggcgctactcgcaccgggccaagaccaccagggccgcgccgccgccggcggctaagatgacgccctcgggggccgaccacatccagcacgccgccaactcatccgccttcagggccgcccagccctctgctgccgctgcgcaccacggctcctccccctccgcagggaagaaccctgtggagggtgtccaggttgagtttgaagccaagtcagctcgagatggcgcatggtatgatgttgctgcgtttctgtcacataggttgtttgaatcaggggaaccggaagtacgggttcgtttttctggatttggagcagaggaagatgaatggatcaatgttcgtaaatgtgtgcgacagcgttctcttccgtgcgaggccactgaatgtgttgcggtgcttcctggggacctcattctttgctttcaggaaggtaaagagcaggctctctattttgatgcccgtgtccttgatgcccaaaggagaaggcatgatgtaagaggatgccgatgtagatttcttgttcgctatgatcatgactcttctgaggaaattgttccactgaggaaggtgtgtcgccgaccagaaactgattacaggcttcagattctgcatgcagccagagcggcagccaccattgattctcacaccccaccacccaaagaggtcaaagtggaggcgacatccaacgagaagagcccagctcagcagaaacccccgaagcagcacaagatgatggacgtgaacaccgatgaggtgtccatggtcgccagcgtggaacaagaagtgacaccaggcaagactgttgcccccttgccgtcagcaacaccagaaacccgcaattcaagttcagacgtcgtgatgaaggaagcggaggcttcctcggtgcttgaagacgatgatgaagtacaagtggttgaaaagatgaaagatggggagtag

SEQ ID NO: 387 - protein, 381 aa, Panicum virgatum
MGRPPSTGAPAFRFLPSEVAEMEARLQQLNNAIPTRAVLQTLADKFSASPERAGRVAIQPKQVWNWFQNRRYSHRAKTTRAAPPPAAKMTPSGADHIQHAANSSAFRAAQPSAAAAHHGSSPSAGKNPVEGVQVEFEAKSARDGAWYDVAAFLSHRLFESGEPEVRVRFSGFGAEEDEWINVRKCVRQRSLPCEATECVAVLPGDLILCFQEGKEQALYFDARVLDAQRRRHDVRGCRCRFLVRYDHDSSEEIVPLRKVCRRPETDYRLQILHAARAAATIDSHTPPPKEVKVEATSNEKSPAQQKPPKQHKMMDVNTDEVSMVASVEQEVTPGKTVAPLPSATPETRNSSSDVVMKEAEASSVLEDDDEVQVVEKMKDGE

SEQ ID NO: 388 - DNA, 1092 bp, Pinus taeda
atgggacggcctccgctgggaggagcaccctccttccgcttcttaccctcggagactgcagatatggaaaaagccctggaagaaagcaagggtgcaaatcctccacgtgatactgtcctttatcttgctgagaagttcagtgcagaacgagaacaacttggaaaattaactgtacaatggaagcagatttggaactggtttcagaatagaaggcatgcccagagatctaaaagtgctaagatggcagtgaagttaaattctatatcttcatcttctgatgattctcttgcgaagagagcctctactaattcttttgcttcactttcaggaagaaaggttccagatagtcaaaaaatggaatttgaggcaaggtctgcaagagatcaagcatggtatgatgttgctggtttccttactcatagaatgttggaactagatgatccagaagttcaagttagatttgaagggtttggagcagaagaagacgagtgggtcaatgtgaaacggtctgttcgtcgtcgttctcttccctgtgaagtttctgaatgcatagcagttttgcctggggacctcatactctgctttcaggaaggaaaagagcaagcactttactatgatgcccatgtattggatgttcaaagaaagcaacatgatatacggggttgtaggtgtcgatttttggttcaatatgaccatgatcagattgaggaggtagtacctctaaggaaagtttgccggcgtccagagacagactttcgtttgcaagcattacatgcttctaaaagatcatcatctactgagctcggacaagggctccaagaatcaaaagaaatttcaactggtaaaatttcttttgtttcatcaaaagagcctaaaggcattggcaactctatggagtctcataatcaacctgcagctatgccaatgatttcctttggtgatgcacttacttctgccaagtctcaaccatgccttccagatagtgcattaaactcaagtgaaagaggtggtaatccttctacatcctcttctattcctcaaattttggatcttaaagcagctgatgctgaaatgaaacttgttgatcaataa

SEQ ID NO: 389 - protein, 363 aa, Pinus taeda
MGRPPLGGAPSFRFLPSETADMEKALEESKGANPPRDTVLYLAEKFSAEREQLGKLTVQWKQIWNWFQNRRHAQRSKSAKMAVKLNSISSSSDDSLAKRASTNSFASLSGRKVPDSQKMEFEARSARDQAWYDVAGFLTHRMLELDDPEVQVRFEGFGAEEDEWVNVKRSVRRRSLPCEVSECIAVLPGDLILCFQEGKEQALYYDAHVLDVQRKQHDIRGCRCRFLVQYDHDQIEEVVPLRKVCRRPETDFRLQALHASKRSSSTELGQGLQESKEISTGKISFVSSKEPKGIGNSMESHNQPAAMPMISFGDALTSAKSQPCLPDSALNSSERGGNPSTSSSIPQILDLKAADAEMKLVDQ

SEQ ID NO: 390 - DNA, 783 bp, Pinus taeda
atgggacgaccccctcaacgcgaatctcagtattttcgttttacaaagaaagaagttgaacagatggaaaaagccctagaagaaatcaagggtgcaacccctgctcaggatgtcgtccagtcccttgccgagaagttcaatgctgcacctgaacgagctggaaaagttcctgtacaagcaaagcaggtattaggctggttcaaccacaagcgacggccacagaaagcaaaaggtgatctaatgccaatgccatcaaattctacgccttcacctcttaatgattgtcctgcaaaaagtgcaacagcaaattctgataaaataccctcagaaaaggagccttcagatgctcctgagtgggaatttgaggctcgatcttcgaaggatggagcttggtatgatgttgctactttccttacacataggatactagagtcaggtgaaccggaagtccgtgtgagatttgctggttttggggcagaagaagatgagtgggtcaacgtgagaaaggctgttcgtctacgttctcttccttgcgaggcaacagattgtgtggccattaagccaggagacctcatactttgttttcgggaaggcaaggaacagtctatctattttgatgcccatgtcttggatgtccaacgaaaacgccatgatgtacgggggtgtcgttgcaggtttttaattcgttatgaccatgaccaggctgaggaaagagtgcccttgcgaagagtttatcgccgtccggaggggttattttcttgggagtttgcagaaaatgtttaa

SEQ ID NO: 391 - protein, 260 aa, Pinus taeda
MGRPPQRESQYFRFTKKEVEQMEKALEEIKGATPAQDVVQSLAEKFNAAPERAGKVPVQAKQVLGWFNHKRRPQKAKGDLMPMPSNSTPSPLNDCPAKSATANSDKIPSEKEPSDAPEWEFEARSSKDGAWYDVATFLTHRILESGEPEVRVRFAGFGAEEDEWVNVRKAVRLRSLPCEATDCVAIKPGDLILCFREGKEQSIYFDAHVLDVQRKRHDVRGCRCRFLIRYDHDQAEERVPLRRVYRRPEGLFSWEFAENV

SEQ ID NO: 392 - DNA, 720 bp, Populus trichocarpa
atggattttgaattcacactttctgagatgctggaaatggagaatatgttcaaggaattagaggagggaccactagctccgcagttttgtgagaagcttgcaagcagctttagtttagcgccaagtcgtgatggaaagcaagccattacacctcgacaggttaaaagctggttccaggatagactaaagaagtcacaacctcgagttgcttcttcaaatatggctctcaaattattcgctgatctctctgatgcaagtgcttcttttggtgcaactgagagttcacaaaagctcaaaggcaatgcctctgatctttcagagttgatttttgaagctttgtcctcaaaagataatgcttggtatgatgttgcttctttcctcaactatagagttgtttgctctggtgaacttgaagtgcgagtaagatttgctgggtttcgtaatacagatgatgagtgggtgaatgtgagaagggcagtgcgggaacgatctattcctttagaatcttcagaatgtcagagggtcaaagttggtgatcttgtgctgtgctttcaggaaagagaagaacgagcagtatactgtgatgcccatattgtagagatcaacaggaaattacatgatataaatggttgtagatgcacctttgtagttcgttatgatcatgacgacttcgaggaagaagttcggttggataggttatgtggcagaccaacgccatag

SEQ ID NO: 393 - protein, 239 aa, Populus trichocarpa
MDFEFTLSEMLEMENMFKELEEGPLAPQFCEKLASSFSLAPSRDGKQAITPRQVKSWFQDRLKKSQPRVASSNMALKLFADLSDASASFGATESSQKLKGNASDLSELIFEALSSKDNAWYDVASFLNYRVVCSGELEVRVRFAGFRNTDDEWVNVRRAVRERSIPLESSECQRVKVGDLVLCFQEREERAVYCDAHIVEINRKLHDINGCRCTFVVRYDHDDFEEEVRLDRLCGRPTP

SEQ ID NO: 394 - DNA, 846 bp, Selaginella lepidophylla
atgggtcgtccaccacaagccgcgggcgttcccgttttccggtttcttccgcaagaggtttcggagatggagcgggtgctggaagcaaataatggtgtatccctacctcggcccggttgcgaagcacttgcggagaagtttagtaatgctccggaacgatttgggcaacttgtaattcagtggaggcaggtttggaactggtttcaaaaccggagacattcacagagggtgaagatggggaagggccagcttccacagcagcaccaggatcttgcaaaagctggaacttcaaccgcaacgccacttgttccaacgaggccggcaatcccagcgccgatgcctagtttcgtgcatcctcctccacaagaggaagagaaagaaatggaatttgaggcgaagtcttcgcgagatggagcttggtacgacgttgccatgttcttgtcttatagggacgagaccctgccggaggttcgagtcaggtttgctggttttgggccggaagaagacgaatgggtagatgtgagaacttccgtccggcaacgctctgttccttgcgaaatattggaatgcgttgtggtactcaagggagacgtgatcctgtgctttcaggagggaaacgagcaggctttgtactacgacgccctggttgtggacattcagaggcgtaggcacgacatgcgaggctgtcggtgccgattttgggtgcgctatcagcacgacggcacggaggaggttgttccactcaagaagatctgccgaagaccagagtcggactttcgattgcaacgaaatagaccaatgaggactgtagattctacccatgcatacgagagcttcaaagtgtaa

SEQ ID NO: 395 - protein, 281 aa, Selaginella lepidophylla
MGRPPQAAGVPVFRFLPQEVSEMERVLEANNGVSLPRPGCEALAEKFSNAPERFGQLVIQWRQVWNWFQNRRHSQRVKMGKGQLPQQHQDLAKAGTSTATPLVPTRPAIPAPMPSFVHPPPQEEEKEMEFEAKSSRDGAWYDVAMFLSYRDETLPEVRVRFAGFGPEEDEWVDVRTSVRQRSVPCEILECVVVLKGDVILCFQEGNEQALYYDALVVDIQRRRHDMRGCRCRFWVRYQHDGTEEVVPLKKICRRPESDFRLQRNRPMRTVDSTHAYESFKV

SEQ ID NO: 396 - DNA, 1641 bp, Selaginella moellendorffii
atggggcgcccgcctcaagccgccggcgtgccggtgtttcgatttcttccacaggaggtcgctcaaatggagagggcgctggaagctaacaacaacatagcgttgccaaggccggaatgtgacgacctcgcggaggctttcaccaatactccagaacgggctgggcaacttccaataacagggaaacaggtcttgaattggttccagaacaggaggcactcgcaaaaggcgaagaaaatcctccaaatgcagcagcaacagcagcaccaagacagcggtagaggctttactccctcgcctttggcgaacgccgcaagtcccatgcaatacatgtacgctccgccgccagaagtcgagaaagagatggacttcgaagccaaatcttctcgtgacggtgcctggtatgatgtatcattgtttctggcacatcgtatagaagcctctgagcacgaggtccgtgttcgttttgttgggtttggatccgaggaagacgaatgggtggacgtgaagacatcagtccggcagcgctctatgccgtgtgacgttgtggagtgcatggttgtccttccgggagatctcatcttatgcttccaggaaggaaacgagcaagccttgtactacgatgccacggttctggacatccagagacggaggcacgacttaagaggctgccggtgtcgattttgggtccgctatgatcacgatcaatcagagacggccagagacggatttacgaatccccaggaacaaacagcactaaagaagcgctgggccgaggagtttgctgctgcctcggcatccacctcctcgccgcagcaatcggcgtgcaatgtggtggcggagctggtggaatcgctggtggcgcagcgtcagcggcgcgaggttgcgctgcggctgcgcgaggcgctgcgtgatgtgaaggccaatttctccttcgccagggtcaagggccttcgccgtctgctcgcattcctgatgctcgccgctgcgtccgagaggggtgtggagctcttccgggagagccagagctatcaagaactccaagtgataccggcgttgttcaagcacacattggcaccgcaaaaatcaccagcgagcgcgccaccggtgtttaactcctcggaagaagcggcagaagtctcgaatcctcccacccctgcggagatcgtcctcgctcttcgcgttcttgagggatgctgcctcgtcgacaactcgagcaaagcggccgcggctcaccacatggccgtcaaggagctgcttgatctgctatcggcgactgggatcccggagcgcacggcttgcctggacgcgctcttggcactgttgctggattctcctgccaatcaaaaagaattcgaatactaccgaggtgtttcaaagatctgcgactcgctaaagaatcgccatgtcgacgtcgcactcaggacgaaatgcgccgagttcttgttgctgctcgtgggagacatactccccaagacggaggcgctgcaagatcaactcaaggagtggatgggcaccgagtgctgcgtcattctctgggacgtttactccaacctcgagcctgcctttgccgatccagagaggaaaaagaggtcgctcaaatcgctagcggagaagatgctaagccttgtagatagctaa

SEQ ID NO: 397 - protein, 546 aa, Selaginella moellendorffii
MGRPPQAAGVPVFRFLPQEVAQMERALEANNNIALPRPECDDLAEAFTNTPERAGQLPITGKQVLNWFQNRRHSQKAKKILQMQQQQQHQDSGRGFTPSPLANAASPMQYMYAPPPEVEKEMDFEAKSSRDGAWYDVSLFLAHRIEASEHEVRVRFVGFGSEEDEWVDVKTSVRQRSMPCDVVECMVVLPGDLILCFQEGNEQALYYDATVLDIQRRRHDLRGCRCRFWVRYDHDQSETARDGFTNPQEQTALKKRWAEEFAAASASTSSPQQSACNVVAELVESLVAQRQRREVALRLREALRDVKANFSFARVKGLRRLLAFLMLAAASERGVELFRESQSYQELQVIPALFKHTLAPQKSPASAPPVFNSSEEAAEVSNPPTPAEIVLALRVLEGCCLVDNSSKAAAAHHMAVKELLDLLSATGIPERTACLDALLALLLDSPANQKEFEYYRGVSKICDSLKNRHVDVALRTKCAEFLLLLVGDILPKTEALQDQLKEWMGTECCVILWDVYSNLEPAFADPERKKRSLKSLAEKMLSLVDS

SEQ ID NO: 398 - DNA, 888 bp, Selaginella moellendorffii
atggggaagccacccgcaatctccacagccaacaacacgcgctgtagatttctcccggaagaggtagcggagatggagaaattgttagtacaccacaatggactcactccatgccgcagcgtacaggaagccctcgcggaaaaattcagcaaaggagctgctcgcacgggtcatgctccagtccggccaaaacagctggataaagtcgatcaaggagcaggaccatcgtcctctggaagaagtatgatcaaatgcacggcagagcagctccttgctcaaagagcaaacgggcttcaattcgaggccatctccagcaaagatggtgcctggtacgatatcagatgttttcttggatataagctcaccgaaacgggaccggagatttttataagatacgctggactgggtggagacgaggatgaatgggtggagctcaagtccattcggaggagatcactaccgtgtgaaggattcgagtgtcttgcagtttatcccggagacaatgttctatgcttccaagaaggcgacgagcatgctctttactacgacgcgagggaagtggtgacgctgaggaaggtgtgtagaaggcccgagacggatgctcgcttgaagacccacttcgagagcagtgatggcagccagcaaaaaccacaagagaagttcgcaaacttcgaggacgatgaaggcgagcaagaagttgatcaagaacaaatccaagaagaagaagaggaccagcaacaagcagacgaggattatacgaaatcgtgtgtgtcaggtgtcgctggtggcttgtcaatcgatctaaacgccacgcctccagtggaagcatttgttctgcggcagtcttctggtggatcatttttgcaacctgagattagagcattataa

SEQ ID NO: 399 - protein, 295 aa, Selaginella moellendorffii
MGKPPAISTANNTRCRFLPEEVAEMEKLLVHHNGLTPCRSVQEALAEKFSKGAARTGHAPVRPKQLDKVDQGAGPSSSGRSMIKCTAEQLLAQRANGLQFEAISSKDGAWYDIRCFLGYKLTETGPEIFIRYAGLGGDEDEWVELKSIRRRSLPCEGFECLAVYPGDNVLCFQEGDEHALYYDAREVVTLRKVCRRPETDARLKTHFESSDGSQQKPQEKFANFEDDEGEQEVDQEQIQEEEEDQQQADEDYTKSCVSGVAGGLSIDLNATPPVEAFVLRQSSGGSFLQPEIRAL

SEQ ID NO: 400 - DNA, 765 bp, Solanum lycopersicum
atggatcttcgtcccagaaaacgacaagtacagtctattactggcttcacacaagctgagcaggttgagaagatggagaacttactaatcgaatcaagagaacaagtttgtgactcagaggtctgcaagaaattggcgaagacgttcacgcgctctaaaggacgtgctgggaaaccaattgctaagtggactgaggtccaagcttggttccagaataggttggtatgctcgtcaaaggataattcagctgaggacaaccaaaaactgcctgattatacagaaggatgcactttgaataaagcaaacgaaagctctcatattccaaaaggccagaaagatccagcattgtcagacatagaatttgaggctaggtcttcaaaagatggggcatggtacgacattgatacatttatcgctcaccggtttcttagctctgaagaacctgaggctcttgtgagatttgtgggctttgggttaggggaggatgaatgggtaaatgtaaggaaggcagtccgtgagcgttccgttgctcttgagaattcagaatgtaacaaagtacaggttggggatattattttgtgcttccaggagggtaaggaggaggaaaaatatcttgaagctcaagttatagaaatccaaaagaaattgcatgatataaggggctgcagatgtctctttgtgattcgatacactggcgatgacaccgaggaaacaattcgtttgaggcgaatgtgtgttcgaccaaacatattagggcgtccttga

SEQ ID NO: 401 - protein, 254 aa, Solanum lycopersicum
MDLRPRKRQVQSITGFTQAEQVEKMENLLIESREQVCDSEVCKKLAKTFTRSKGRAGKPIAKWTEVQAWFQNRLVCSSKDNSAEDNQKLPDYTEGCTLNKANESSHIPKGQKDPALSDIEFEARSSKDGAWYDIDTFIAHRFLSSEEPEALVRFVGFGLGEDEWVNVRKAVRERSVALENSECNKVQVGDIILCFQEGKEEEKYLEAQVIEIQKKLHDIRGCRCLFVIRYTGDDTEETIRLRRMCVRPNILGRP

SEQ ID NO: 402 - DNA, 915 bp, Solanum lycopersicum
atggatgatttgatggaaacagatgaagaattaatggatttcaccttagctgaagctatggaaatgaccactttctttaaaggattgaaaggaaaatcaatcagtcaagagttgtgtcaagaatttgctaacaagtttagttcttcaccatttcgtactgggaaatctataataaaaggggaacaggtgaaaagttggtttcttgataagcaaaaaccgaaagcagctgaagtccctgatgatgattatgtagaacatgttgatgattacgaagaacctattgttcctaaacgacgaggaagaaaaccaaaatctaaaaacacaagttcatctctggtggtctacaaaaaatacgatgcttgtggttacacaagactcccagaatgtgcatatgacttgcctcagaggcccagagtttctgcagcagagatggccaaagaactcagagggttgtcttttgaagctctgtcagcaaaggatttagcttggtatgacgtgggctcatttctcaacttcagagttctttacacgggcgagcttgaagttcgtgtaagatttgctggctttggtaatgaagaagatgaatgggtgaatgttaaaaggggagtacgtgaacgttctgttcccttagagccctcagaatgtgtcaagctgagtgttggagatcctgtgatgtgcttcagggaagatgaatatctcgcagtatatggtgacgcagaggttgtggagatccaaagaaatctacatgataatacaagatgcacgtgcatctttgtcgtccgctatgacttagataaggctgaggagaaaattgtactggacaagatatgttgcagaccgaacttcatcaataacaagaacaagaacaacaacgacaacacacccactgaaatttccaccacaagtggagtctga

SEQ ID NO: 403 - protein, 304 aa, Solanum lycopersicum
MDDLMETDEELMDFTLAEAMEMTTFFKGLKGKSISQELCQEFANKFSSSPFRTGKSIIKGEQVKSWFLDKQKPKAAEVPDDDYVEHVDDYEEPIVPKRRGRKPKSKNTSSSLVVYKKYDACGYTRLPECAYDLPQRPRVSAAEMAKELRGLSFEALSAKDLAWYDVGSFLNFRVLYTGELEVRVRFAGFGNEEDEWVNVKRGVRERSVPLEPSECVKLSVGDPVMCFREDEYLAVYGDAEVVEIQRNLHDNTRCTCIFVVRYDLDKAEEKIVLDKICCRPNFINNKNKNNNDNTPTEISTTSGV

SEQ ID NO: 404 - DNA, 924 bp, Solanum tuberosum
atggatgacttgatggaaacagatgaagaattaatggatttcaccttagctgaggctatggaaatgaccactttctttaaaggattcaaaggaaaatcaatcagtcaagagttgtgtcaagaatttgctaccaagtttagttcttcgccatttcgtactgggaaatctttaataaaaggggaacaggtgcaaagttggtttcttgataagaaaaaaccaaaagcagctgaagtccctgttgatgattatgtagaacatgttgatgattatgatgaacctgttgttcctaaacgacgaggaagaaaaccaaaatctaaaaacacaagttcatctctggtggtctacaaaaaatacgatgcttgtggttacacaagactcccagaatgtgcatatgacatgcctcagaggcccagagtttctgcagcagagatggccaaagaactcacagggttggcttttgaagctctgtcagcaaaggatttagcttggtatgatgtggcctcatttctcaacttcagagttctttacacgggcgagcttgaagttcgtgtaagatttgctggctttggtaatgaagaagatgaatgggtgaatgttaaaaggggagtacgtgaacgttctgttcccttagagccctcagaatgtgtcaagctgagcgttggagatcctgtgatgtgcttcagggaagatgaatatctcgcagtatatggtgactcagaggttgtggagatccaaaggaatctacatgatattacaagatgcacgtgcatctttgttgtccgctatgacttagataaggctgaggagaaaattacactcgacaagatgtgttgcagaccaaacttcacctataacaagaacaacaacaacgacaacacacccagtgaaattccactagtggagtctgaggaggataggatgtag

SEQ ID NO: 405 - protein, 307 aa, Solanum tuberosum
MDDLMETDEELMDFTLAEAMEMTTFFKGFKGKSISQELCQEFATKFSSSPFRTGKSLIKGEQVQSWFLDKKKPKAAEVPVDDYVEHVDDYDEPVVPKRRGRKPKSKNTSSSLVVYKKYDACGYTRLPECAYDMPQRPRVSAAEMAKELTGLAFEALSAKDLAWYDVASFLNFRVLYTGELEVRVRFAGFGNEEDEWVNVKRGVRERSVPLEPSECVKLSVGDPVMCFREDEYLAVYGDSEVVEIQRNLHDITRCTCIFVVRYDLDKAEEKITLDKMCCRPNFTYNKNNNNDNTPSEIPLVESEEDRM

SEQ ID NO: 406 - DNA, 1146 bp, Sorghum bicolor
atgggtcgtccgccgagcaccaccggtgctccggcgttccgcttcctcccgtccgaggtggcggagatggaggcccgcctgcagcagctcaacaacggcatcccttcccgcggcgtgctccagaccctcgccgataagttctccgcctcgcctgagcgcgccggcaaggtggccatccagcccaagcaggtgtggaactggtttcagaacaggcgctactcgcaccgtgccaagtccaccagggccgtgccgtcgccgccggctaagatgacgccctcgggggccgatcaccaccagcacgccgccaacgcctccgccttcagggccgctcagccctcttctgtcgctgctgctcaccatggcgcctccccaacagggaagaaccctgtggaaggtgtctcggttgagtttgaggccaagtcagcccgtgatggtgcatggtatgatgttgctgcctttctgtcacaaaggttgtttgaaactggtgaaccggaagtgcgggttcgtttttctggatttggggctgaggaggatgaatggatcaacgttcgcaaatgtgtgcgacaacgttctcttccatgcgaggccacagaatgtgttgctgtgcttcctggggacctcattctttgttttcaggaaggtaaagagcaggctctctattttgatgctcgtgtccttgatgctcaaaggagaaggcatgatgttagaggctgccgttgtagatttcttgttcgctatgatcatgattcttctgaggaaattgttccactgaggaaggtgtgccgccgaccagatactgactacaggcttcagattctgcatgctgctagagtggcagccacgaatgcagatattcacactccacccaaagagattaaagtggagttgacatccaatgataaaagcccaaccgagcagaaaccccagaagcagcacaagatgatggacgtgaatactgatgaggtgaccatggtgtccaccttggaacaagacgagacacaaggcaagactgtcgcccccttaccgtcatcaactgtagaaacccgcaattcaagttcagatgcggtgatgaaggatgcggaggcttcctcggtggttgaagatgacgacgaagttcaggtggttgacaagatgaaagagggctag

SEQ ID NO: 407 - protein, 381 aa, Sorghum bicolor
MGRPPSTTGAPAFRFLPSEVAEMEARLQQLNNGIPSRGVLQTLADKFSASPERAGKVAIQPKQVWNWFQNRRYSHRAKSTRAVPSPPAKMTPSGADHHQHAANASAFRAAQPSSVAAAHHGASPTGKNPVEGVSVEFEAKSARDGAWYDVAAFLSQRLFETGEPEVRVRFSGFGAEEDEWINVRKCVRQRSLPCEATECVAVLPGDLILCFQEGKEQALYFDARVLDAQRRRHDVRGCRCRFLVRYDHDSSEEIVPLRKVCRRPDTDYRLQILHAARVAATNADIHTPPKEIKVELTSNDKSPTEQKPQKQHKMMDVNTDEVTMVSTLEQDETQGKTVAPLPSSTVETRNSSSDAVMKDAEASSVVEDDDEVQVVDKMKEG

SEQ ID NO: 408 - DNA, 900 bp, Sorghum bicolor
atggagcggcggtccgtccgcttcgtgccagccgagattgcaaggatggagaaattggctgcagatagaaacgagcaagtctttgataacaagttctgccagaagcttgcagaagaatttaatcgttctgctggccgtgctggaagtaaagcgttacaggctacacaggttcaaggatggttccttaataagtttccagcatcagccactaaacctacttgtgtgcccactgcttgccaagaaaagactccagcctcagaagtaaatgtatcagtttctgaaaaaagatctgcagcttctgaagaaaaacttgtgtgcccactgcttcccaagaaaagtacttcagcctcagaagtaaatgtatcagtttctaaaaaaagatctgcagcttctgaagaaaaacttttccctcctgatacaagtgtttcaaacaatgaggatgaggtttctcctgttttttcattagaaactagagatatgattcctgaacttgatgacctggagtttgaagccaagtctgcaaaggattctgcctggtatgacattgccatgttcttggcacataggacgaacaaggcgggtgaagtagaagtccgggtgagattcgagggttttggggctgatgaggatgagtgggtgaatgtcaagaagttcatccgccagcgttccattcctctggagtcctcacagtgcaaaagcattgttgaaggagaccttgtcctctgcttcagggagggaaacgacgaggcattgcatttcgatgcgcatgttcttgaggttacgcggaagcagcatgatattagggggtgcagatgtgtattccttattgaatacgatcatgaccaaagccaggagagggtgagcctgagaagattgtcccggcggccaaagtacttctga

SEQ ID NO: 409 - protein, 299 aa, Sorghum bicolor
MERRSVRFVPAEIARMEKLAADRNEQVFDNKFCQKLAEEFNRSAGRAGSKALQATQVQGWFLNKFPASATKPTCVPTACQEKTPASEVNVSVSEKRSAASEEKLVCPLLPKKSTSASEVNVSVSKKRSAASEEKLFPPDTSVSNNEDEVSPVFSLETRDMIPELDDLEFEAKSAKDSAWYDIAMFLAHRTNKAGEVEVRVRFEGFGADEDEWVNVKKFIRQRSIPLESSQCKSIVEGDLVLCFREGNDEALHFDAHVLEVTRKQHDIRGCRCVFLIEYDHDQSQERVSLRRLSRRPKYF

SEQ ID NO: 410 - DNA, 1014 bp, Triticum aestivum
atgacggggcaggcgccaagtctcctgttccggttcaccgacacggaggtcgccaagatggaggaggtcctccgtgacctcaacgccatgcccaagcatcctgtcatccagggcctcaccgacgacttcaacgcctccccggaccgctccggcgacggcaaggtccccgtccagtacaatcaggtgaggaattggttccagaaccggaggtccgcgcagtccaggaagatgatggtgcccccagtggccgaggaacaccacccagtggacggatcatactcagggaatagttctttggatggtggccatgtccagtttgaggcaaagtcagcaatcaatggcgcatggtacgatgttgctgcctttctgtcccacaggttcattggaacaaaggacccggaagtactagttcgatttacttggcttggacccgaggaggatgaatggattaatgttcgtaaatgtgtgaggctgcgttctcttccatgtgaagctgcagaatgtgttgctgtgcttcctggggatctcattctttgttttcaggaaggcaaagagcaggccctctattttgacgctcgtgttcttgatgctcaaaggcgcaggcatgatgtaagagggtgccgctgcaggtttcttgttcgttatgatcatgatcactctgaggagattgttcctctgaggaaggtatgccgtcgaccagaaactgatttcaggctccagatcttgcacgcatctagagcggcggcctctgcggatgctcagaatgttagcccagttgagcagaaaccccaaaaggcgcacaagatgatggatgtgaacactgccgaggtgaccgtggttcgcaacccagatcaaggagggccatctgacaagccggctgctcccttaccagctgcgcctgctggcacccacggtgattcagtttcagatgtgcagatggggaatgtggaggttattccaaaagttgaagctgcaaatgaagcacatgatgacaacatgaacgtgggagcgtag

SEQ ID NO: 411 - protein, 337 aa, Triticum aestivum
MTGQAPSLLFRFTDTEVAKMEEVLRDLNAMPKHPVIQGLTDDFNASPDRSGDGKVPVQYNQVRNWFQNRRSAQSRKMMVPPVAEEHHPVDGSYSGNSSLDGGHVQFEAKSAINGAWYDVAAFLSHRFIGTKDPEVLVRFTWLGPEEDEWINVRKCVRLRSLPCEAAECVAVLPGDLILCFQEGKEQALYFDARVLDAQRRRHDVRGCRCRFLVRYDHDHSEEIVPLRKVCRRPETDFRLQILHASRAAASADAQNVSPVEQKPQKAHKMMDVNTAEVTVVRNPDQGGPSDKPAAPLPAAPAGTHGDSVSDVQMGNVEVIPKVEAANEAHDDNMNVGA

SEQ ID NO: 412 - DNA, 969 bp, Triphysaria sp.
atgggccgaccgccgagcaatggaggtccctccttccgctttaacgccgccgaggttggggaaatggaggcgattttgctagcacacaattgcgtagtgccagcacgtgaaactattgaggctctttcccagaggtttagtgccacaggtgaacgagccggaaaagttgaagtttcatttaaacaagtcttaaactggttccaaaacaggcgatatgctatccgagcaaaagcagctagggtgcccgttcctggtgagacgaacatctatcatatgcctcacaatggtcgagctgcggttctcaatgtgcctcaggctcctcagcatcagcctcaacctcagttcactcccacaagtgcaactaaagaaactcctataatggaatttgaagccaagtcttctagagatggggcatggtatgatgttacttatttcctgtcgtacagatcattagagactagagagccggaagctctagttcgttttgccggttttggaccagaagaggatgaatgggtcaatatccgcaggcatgtgagacaacgatcactaccgtgtgaatcttcagaatgtgtagccgttctacctggggatttggccctatgctttcaggaaggaaaagagcaagccctatattttgatgcacacgttcttgatgcacaaaggcggaggcatgacgtaagaggctgtcgttgtaggtttctggtgcgatatgatcacgatgaagctgaggaaatagttcccctcaggaagatatgccgtcggcccgatactgattataggatgcagcaactaagcgccatgcccactaacgtgaacgcacaacctgggttgaaagttgatgctacaggcgaaacaacacaaagccagcccaagcccgagggccgtgttgattttggagctgtcactctagccaatgtttccataccatcacctgaacttaaatccgaaacgttgttgcattcctga

SEQ ID NO: 413 - protein, 322 aa, Triphysaria sp.
MGRPPSNGGPSFRFNAAEVGEMEAILLAHNCVVPARETIEALSQRFSATGERAGKVEVSFKQVLNWFQNRRYAIRAKAARVPVPGETNIYHMPHNGRAAVLNVPQAPQHQPQPQFTPTSATKETPIMEFEAKSSRDGAWYDVTYFLSYRSLETREPEALVRFAGFGPEEDEWVNIRRHVRQRSLPCESSECVAVLPGDLALCFQEGKEQALYFDAHVLDAQRRRHDVRGCRCRFLVRYDHDEAEEIVPLRKICRRPDTDYRMQQLSAMPTNVNAQPGLKVDATGETTQSQPKPEGRVDFGAVTLANVSIPSPELKSETLLHS

SEQ ID NO: 414 - DNA, 1017 bp, Triphysaria sp.
atgggccgaccgccgagcaatggaggtccctccttccgctttaacgccgccgaggttggggaaatggaggcgattttgctagcacacgattgcgtagtgccagcacgtgaaactattgaggctctttcccagaggtttagtgccacaggtgaacgagccggaaaagttgaagcttcatttaaacaagtcttaaactggttccaaaacaggcgatatgctatccgtgcaaaagcagctagggtgcccgttcctggtgagacgaacatctatcatatgcctcacaatggtcaagctgcggttctcaatgtgcctcaggctcctcagcatcagcctcaacctcagttcactcccacaaccatgaaaagtgtgccgttagttcctcatcctcatcctgttccatcaggtgcaactaaagaaactcctataatggaatttgaagccaagtcttctagagatggggcatggtatgatgttacttatttcctgtcgtacagatcattagagactagagagccggaagctctagttcgttttgccggttttggaccagaagaggatgaatgggtcaatatccgcaggcatgtgagacaacgatcactaccgtgtgaatcttcagaatgtgtagccgttctacctggggatttggccctatgccttcaggaaggaaaagagcaagccctatattttgacgcacacgttcttgatgcacaaaggcggaggcatgacgtaagaggctgtcgttgtaggtttctggtgcgatatgatcacgatgaagctgaggaaatagttcccctcaggaagatatgccgtcggcccgatactgattataggatgcagcaactaagcgccatgcccactaacgtgaacgcacaacctgggttgaaagttgatgctacaggcgaaacaacacaaagccagcccaggcccgagggccgtgttgattttggagctgtcactctagccaatgtttccataccatcacctgaacttaaatccgaaacgttgttgcattcctga

SEQ ID NO: 415 - protein, 338 aa, Triphysaria sp.
MGRPPSNGGPSFRFNAAEVGEMEAILLAHDCVVPARETIEALSQRFSATGERAGKVEASFKQVLNWFQNRRYAIRAKAARVPVPGETNIYHMPHNGQAAVLNVPQAPQHQPQPQFTPTTMKSVPLVPHPHPVPSGATKETPIMEFEAKSSRDGAWYDVTYFLSYRSLETREPEALVRFAGFGPEEDEWVNIRRHVRQRSLPCESSECVAVLPGDLALCLQEGKEQALYFDAHVLDAQRRRHDVRGCRCRFLVRYDHDEAEEIVPLRKICRRPDTDYRMQQLSAMPTNVNAQPGLKVDATGETTQSQPRPEGRVDFGAVTLANVSIPSPELKSETLLHS

SEQ ID NO: 416 - DNA, 933 bp, Triticum aestivum
atgacggggcaggcgccaagtctcctgttccggttcaccgacacggaggtcgccaagatggaggaggtcctccgtgacctcaacgccatgcccaagcatcatgtcatccagggcctcaccgacaatttgaacgcctccccggaccgctccggcgacggcaaggtccctgtccagtacaatcaggtgaggaattggttccagaaccggatgtccgtgcagtccaggaagatgatggtccccccagtggccgaggaacaccacccagtggccggatcttactcagggaatagttcttcggatggtggccatgtccagtttgaggcaaagtcagcaagaaatggcgcatggtacgatgttgctgcctttctgtcccacaggttcactggaacaaaggacccggaagtactagttcgatttacttggcttggacccgaggaggatgaatgggttgatgtttgtaaatgtgtgagagtgcgttctcttcaatgtgttgctgtgctgcctggggatctcattatgtgttttaaggaagataaagagcaggcccgctattttgatgcacatgttcttcaagttcaaaggcgcaggcatgacgtaagggggtgccgctgcaggtttcttgtttgttatgatcatcatcactctgaggagtttgttccattgagcaaggtatgccgtcgatcagtgcaccagaaagcccaaaagccgcacgagatgatggatgtcaacactgacaaggtgaccgggggcggggttcccattccaccagatcaaggaggtccatctgacaagccggttgctcccttacttgactcgcctactagcactggcagcaattcagtggcagatgttgaggcggggggcatggaggctaccccaaatggtgaaggtgcagatgaagcacatggcgacaagattgatgtgggagcgtag

SEQ ID NO: 417 - protein, 310 aa, Triticum aestivum
MTGQAPSLLFRFTDTEVAKMEEVLRDLNAMPKHHVIQGLTDNLNASPDRSGDGKVPVQYNQVRNWFQNRMSVQSRKMMVPPVAEEHHPVAGSYSGNSSSDGGHVQFEAKSARNGAWYDVAAFLSHRFTGTKDPEVLVRFTWLGPEEDEWVDVCKCVRVRSLQCVAVLPGDLIMCFKEDKEQARYFDAHVLQVQRRRHDVRGCRCRFLVCYDHHHSEEFVPLSKVCRRSVHQKAQKPHEMMDVNTDKVTGGGVPIPPDQGGPSDKPVAPLLDSPTSTGSNSVADVEAGGMEATPNGEGADEAHGDKIDVGA

SEQ ID NO: 418 - DNA, 816 bp, Triticum aestivum
atggagcggcgatccaccacccgcttctcgccttccgagattgcgaggatggagaagttggtttcatcagacagaaaagagcaagtcttggttgatagtttctgccagaagcttgtagaagaatttaatcgttctccagctcgagtcggaagcagagctctacaggctacacaggttcgaggatggttccttgataagctccctgcatcaactcctaaacctgcttccttgcctactacttctgaagaaaagcctttagcctcagaaccagatgcgttagtttctgagataaagacttcagcttctgatgaagaaaaagttttagctcttgatacaagtatttcaaacaatgaggatgcactttctgcggatttacccaaagagactacagataaggttcctgaatttgaagacttgcagtttgaggctaagtcatcaaaggattctgcatggtatgacgtcgcccttttcttggcacacaggaagacaagtttgggagaagttgaagtccgggtgaggtttatcggatatggggctgaagaagatgagtgggtgaatgtcaggaaggctgtccgccagcaatccattccgctggagtcctcagaatgccgaagcattgtcaaaggagatcttgtcctgtgtttcaaggagagcaatgatgaagcactgcatttcgatgcacacgttgtggatgtccagcggaaacagcatgatataaggggatgcagatgcctcttccatgttgaatatgatcatgatcaaagccaggagatggtgaacctcaagagaatctccaggcggccaagatacctttga

SEQ ID NO: 419 - protein, 271 aa, Triticum aestivum
MERRSTTRFSPSEIARMEKLVSSDRKEQVLVDSFCQKLVEEFNRSPARVGSRALQATQVRGWFLDKLPASTPKPASLPTTSEEKPLASEPDALVSEIKTSASDEEKVLALDTSISNNEDALSADLPKETTDKVPEFEDLQFEAKSSKDSAWYDVALFLAHRKTSLGEVEVRVRFIGYGAEEDEWVNVRKAVRQQSIPLESSECRSIVKGDLVLCFKESNDEALHFDAHVVDVQRKQHDIRGCRCLFHVEYDHDQSQEMVNLKRISRRPRYL

SEQ ID NO: 420 - DNA, 813 bp, Triticum aestivum
atggagcggcgatccaccacccgcttctcgccatccgagattgcgaggatggagaagttggtttcatcagacagaaaagagcaagtcttggttgatagtttctgccagaagcttgtagaagaatttaatcgttctccagcccgagtaggaagcagagctctacaggctacacaggttcgaggatggttccttgataagctccctgcatcaactcctaaacctgcttccttgcctactacttctgaagaaaagcctttagcctcagaaccagatgcgttagtttctgagataaagacttcagcttctgaagaaaaagctttagctcttgatacaagtatttcaaacaatgaggatgcactttctccagatttacccaaagagactacagataaggttcctgaatttgaagacttgcagtttgaggccaagtcatcaaaggattctgcatggtatgacgtcgcccttttcttggcacacaggaagacaagtttgggagaagttgaagtccgggtgaggtttatcggatatggggctgaagaagatgagtgggtgaatgtcaggaaggctgtccgccagcaatccattccgctggagtcctcagaatgccgaagcattgtcaaaggagatcttgtcctgtgtttcaaggagagcaatgatgaagcactgcatttcgatgcacacgttgtggatgtccagcggaaacagcatgatataaggggatgcagatgcctcttccatgttgaatatgatcatgatcaaagccaggagatggtgaacctcaagagaatctccaggcggccaagatacctttga

SEQ ID NO: 421 - protein, 270 aa, Triticum aestivum
MERRSTTRFSPSEIARMEKLVSSDRKEQVLVDSFCQKLVEEFNRSPARVGSRALQATQVRGWFLDKLPASTPKPASLPTTSEEKPLASEPDALVSEIKTSASEEKALALDTSISNNEDALSPDLPKETTDKVPEFEDLQFEAKSSKDSAWYDVALFLAHRKTSLGEVEVRVRFIGYGAEEDEWVNVRKAVRQQSIPLESSECRSIVKGDLVLCFKESNDEALHFDAHVVDVQRKQHDIRGCRCLFHVEYDHDQSQEMVNLKRISRRPRYL

SEQ ID NO: 422 - DNA, 744 bp, Vitis vinifera
atggatgatgcccctgttcctattgcttgttttacacaatctgagatcttggaaatggagaatttatttgaggaatttggagaagaaacgctaggccaggaattctgccaagatcttgccaccagctttagtgcctcaccaggttgttctgggaatatgcccgtaggatggaaagaggtgcgagattggttccaaactaagcaaaaagagttggttgctagagtcacttcctcacctgttgctcccagaggaatcgatgctcttccagaagcacccatgtcaaacaatgcacctcaaaattctatagttccaagaggggacatggttgcagcagatctttcagagttgacgtatgaggctaaatcatcaaaagatgatgcatggtacgacgttgctgcattcctcacctacagagttcttagctctggtgaacttgaagctcgtgtaagattttctggatttggcaatgaggaggacgagtgggtgaatgtcaaaaagggaatacgaaagcggtcgattcctctagagccttcagagtgttacagggtcagagttggagatttggtgttatgcttccaggaaagatcagatcaagcagtctactgtgatgcccacattatagaaatccaaaggaggttacatgacattaagggctgcaggtgcatcttcgtggttcgctatgatcatgaccatggcgaggaaaaggttaacttgaagagattatgttgcagaccaacactgtag

SEQ ID NO: 423 - protein, 247 aa, Vitis vinifera
MDDAPVPIACFTQSEILEMENLFEEFGEETLGQEFCQDLATSFSASPGCSGNMPVGWKEVRDWFQTKQKELVARVTSSPVAPRGIDALPEAPMSNNAPQNSIVPRGDMVAADLSELTYEAKSSKDDAWYDVAAFLTYRVLSSGELEARVRFSGFGNEEDEWVNVKKGIRKRSIPLEPSECYRVRVGDLVLCFQERSDQAVYCDAHIIEIQRRLHDIKGCRCIFVVRYDHDHGEEKVNLKRLCCRPTL

SEQ ID NO: 424 - DNA, 945 bp, Vitis vinifera
atggatcgccttcgccctagagagagacggctgttttctggcttcacaaaactcgaggtggaaaaaatggagaaggtgctcaaggaatcaggagaacaggcattgaacccagatttctgcaaaagactaacgggtggttttaatcgctcttcaggtcgtgctgggaaacctgctataaaatggattgaggtgcaaagttggtttcaggataggctacaagagtgcacgcacaaagtttcttgtccacctaatgtctccaaggaactgtgtgttttaccagaaacattcccttcaaataagctacatgaaagttctcaaatgcctgaaggagacccagatttatcagaattagaatttgaggcacggtcatccaaagatggggcttggtatgatgttgatacattcctcacccacagatttcttagttcaggtgaacttgaagttcgtgtaagatttgttggatttggggctgaggaggatgaatgggtaaatgtgaaaaaggcggtgcgtgaacgctctctccccctggagcattcagaatgtcacaaagttaaggttggagacgtcgttctctgcttccaggaaaggagggatcaagcaatctactatgatgcccatgttgtagaaattcaaagaaaaatgcatgatataaggggatgcaggtgtctcttcttgattcgatatgaccatgacaacacagaggcaagcattgttgaatccacacaaattttcttctctccttttatatcatcaatcaagttaataattcatccctttgacttttggttcaaatattcttctgttttctttcttttttcctttttctcaggaaagagttcatctgaggagattatgttgcaggccaacatgttaaatttgtcagaaaatggcatcgacaatataggtatggttggaaatcttttagggtttttggtggggggatag

SEQ ID NO: 425 - protein, 314 aa, Vitis vinifera
MDRLRPRERRLFSGFTKLEVEKMEKVLKESGEQALNPDFCKRLTGGFNRSSGRAGKPAIKWIEVQSWFQDRLQECTHKVSCPPNVSKELCVLPETFPSNKLHESSQMPEGDPDLSELEFEARSSKDGAWYDVDTFLTHRFLSSGELEVRVRFVGFGAEEDEWVNVKKAVRERSLPLEHSECHKVKVGDVVLCFQERRDQAIYYDAHVVEIQRKMHDIRGCRCLFLIRYDHDNTEASIVESTQIFFSPFISSIKLIIHPFDFWFKYSSVFFLFSFFSGKSSSEEIMLQANMLNLSENGIDNIGMVGNLLGFLVGG

SEQ ID NO: 426 - DNA, 1143 bp, Zea mays
atgggtcgtccgccgagcgccggtgctccggcgttccgcttcctcccgtccgaggtggcggagatggaggcgcgcctgctgcagctcaacaacggcatccccacccgcgccgtgctgcagaccctcgcggataagttctccgcttcgcccgagcgcgctggcaaggtggccatccagcccaagcaggtgtggaactggtttcagaacagacggtactcacaccgggccaaaactcccagggccgcgtcgtcaccgccggctaagatgacgccctcgggagctgatcaccaccagcatgccgctaacgcctccgccttcagggctgctcagctctcttctgttgctgctgcgcaccacggttcctcctctacagggaagaatcctgtggaaagtgtctcagttgagtttgaggccaagtcagctcgtgatggtgcatggtatgatgttgctgcctttctttcacataggttgtttgaatccggtgacccggaggtgcgggttcgtttttctggatttggggcagaggaggatgaatggatcaatgttcgcaaatgtgtgcgacaacgttctcttccatgcgaggccacagaatgtgttgctgtgcttcctggggacctgattctttgttttcaggaaggtaaagatcaggctctctattatgatgctcatgtccttgatgctcaaaggagaaggcatgacgttagaggttgccgttgtagatttcttgttcgctacgaccatgattcttctgaggaaattgttccactgaggaaggtgtgccgccgaccggaaactgactacaggcttcagattctgcatgctgctagagcggcagccactaatgcagatgttcacactccacccaaagaggttaaggtggagttggcgtccactgataagagcccagccgagcagaaaccccataagcagcacaagatgatggacgtgaacactgatgaggtgaccatggtctccaccttggagcaagatgagacaccaggcaagactgtagcccccgtaccgtcagcaactgcagaaacccgcaattcaagttcggacacagtgatgaaaggtgctgaggcttcctcggtcgttgaagatgacgatgaagtgcaggcagttgacaagatgaaagaggggtag

SEQ ID NO: 427 - protein, 380 aa, Zea mays
MGRPPSAGAPAFRFLPSEVAEMEARLLQLNNGIPTRAVLQTLADKFSASPERAGKVAIQPKQVWNWFQNRRYSHRAKTPRAASSPPAKMTPSGADHHQHAANASAFRAAQLSSVAAAHHGSSSTGKNPVESVSVEFEAKSARDGAWYDVAAFLSHRLFESGDPEVRVRFSGFGAEEDEWINVRKCVRQRSLPCEATECVAVLPGDLILCFQEGKDQALYYDAHVLDAQRRRHDVRGCRCRFLVRYDHDSSEEIVPLRKVCRRPETDYRLQILHAARAAATNADVHTPPKEVKVELASTDKSPAEQKPHKQHKMMDVNTDEVTMVSTLEQDETPGKTVAPVPSATAETRNSSSDTVMKGAEASSVVEDDDEVQAVDKMKEG

SEQ ID NO: 428 - DNA, 1149 bp, Zea mays
atgggtcgtccgccgagcaccactggtgctccggccttccgcttcctcccttccgaggtggcggagatggaggcgcgcttgctgcagctcaacaacggcatccccacccgcgccatgctccagactctcgccgataagttctccgcctcgcccgagcgcgccggcaaggtggccatccagcccaagcaggtgtggaactggtttcagaacaggcgttactcgcatcgggccaagaccaccagggtcgtgccgtctccaccggctaagatgaccccctcgggggccgatcaccaccagcacgccgctaacgcctccgccttcagggccgctcagccctcttctgtcgctgttgctcaccatggctcctcctcgacagggaagaaccctatggaaggtgtctcagttgagtttgaggccaagtcagctcgtgatggtgcatggtatgatgttgctgcctttctgtcacataggttgtttgaatccggtgacccggaagtgcgggttcgtttttctggatttggggcagaggaggatgaatggatcaatgttcgcaaatgtgtgcgacaacgttctcttccatgcgaggccacagaatgcgttgctgtgcttcctggggacctcattctttgttttcaggaagataaagagcaggctctctattttgatgctcgtgtccttgatgctcaaaggagaaggcatgatgttagaggttgccgttgtagatttcttgttcgctatgatcatgactcttctgaggaaattgttccactgaggaaggtgtgccgccgaccagaaactgactacaggcttcagattctgcatgctgctagagcggcagccgccagtgcagatattcacactccacccagagaggctaaagtggagttggcatccaatgctaagagcccatatgagcaaaaaccccagaagcagtacaagatgatggacgtgaacactgatgaggaggtgaccatggtctccaccttggaacaggatgagacacaaggcaagactgtagcccccgtaccgtcagcaactgcagaaacccgcaattcaagttcagacgcggtgatgaaggatgcggaggcttcgtccgtggctcaagacgatgatgaagtgcaggtggttgacaagatgaaagaggggtag

SEQ ID NO: 429 - protein, 382 aa, Zea mays
MGRPPSTTGAPAFRFLPSEVAEMEARLLQLNNGIPTRAMLQTLADKFSASPERAGKVAIQPKQVWNWFQNRRYSHRAKTTRVVPSPPAKMTPSGADHHQHAANASAFRAAQPSSVAVAHHGSSSTGKNPMEGVSVEFEAKSARDGAWYDVAAFLSHRLFESGDPEVRVRFSGFGAEEDEWINVRKCVRQRSLPCEATECVAVLPGDLILCFQEDKEQALYFDARVLDAQRRRHDVRGCRCRFLVRYDHDSSEEIVPLRKVCRRPETDYRLQILHAARAAAASADIHTPPREAKVELASNAKSPYEQKPQKQYKMMDVNTDEEVTMVSTLEQDETQGKTVAPVPSATAETRNSSSDAVMKDAEASSVAQDDDEVQVVDKMKEG

SEQ ID NO: 430 - DNA, 810 bp, Zea mays
atggagcggcggtcctccgtccgctttgtgccatccgagattgcaaggatggagaaattggctgcagatagaaaagaccaagtctttgataacaagttctgccagaagcttgcagaagaatttaatcgttctgttggccgtgctggaagtaaagcgttacaagctacacaggttcaaggatggtttcttaataagtttccagcatcagccactaaacctacttgtgtgcccactgcttcccaagaaaagacttcagcctcagaaataaatgtatcagtttctgaaaaaagatctgcagcttccgaagagaaacttttccctcttgatacaggtgtttcaaataatgaggatgaggtttctcctgtttttccattagaaactaaagatatgattcctgaacttgaagacctggagtttgaggccaagtctacaaaggattttgcctggtatgacattgccctattcttggcacacaggaggaacagggcgggtgaagtagaagtccgggtgagattcgagggttttggggcggatgaggatgagtgggtgaatgtcaagaagttcatccgccagcgttccattcctctggagtcctcacagtgcaaaagcgttgttgaaggtgaccttgttctctgcttcagggagggaaacgaggaggcattgcatttcgatgcacatgttcttgaggttcagcggaagcagcatgatattagggggtgcagatgtgtattccttgttgaatacgatcatgaccaaagccaggagagggttagcctgagaagattgtcccggcggccaaagtacttttga

SEQ ID NO: 431 - protein, 269 aa, Zea mays
MERRSSVRFVPSEIARMEKLAADRKDQVFDNKFCQKLAEEFNRSVGRAGSKALQATQVQGWFLNKFPASATKPTCVPTASQEKTSASEINVSVSEKRSAASEEKLFPLDTGVSNNEDEVSPVFPLETKDMIPELEDLEFEAKSTKDFAWYDIALFLAHRRNRAGEVEVRVRFEGFGADEDEWVNVKKFIRQRSIPLESSQCKSVVEGDLVLCFREGNEEALHFDAHVLEVQRKQHDIRGCRCVFLVEYDHDQSQERVSLRRLSRRPKYF

SEQ ID NO: 432 - DNA, 942 bp, Zea mays
atatactacaaactaaattagaaaactctgtacgacaacatcaagtcctccaaacacaaaaagtgcgaaaaaaagctacccctctttcatcttgtcaaccacctgcacttcatcatcgtcttgagccacggacgaagcctccgcatccttcatcaccgcgtctgaacttgaattgcgggtttctgcagttgctgacggtacgggggctacagtcttgccttgtgtctcatcctgttccaagggggagaccatgggcacctcctcatcagggttcacgtccatcatcttggactgcttctgggggttttgctcatatgggctcttagcattggatgccaactccactttagcctctctggggggagtgggaatatctgcacgtggcggctgcgcgctctagcagcatgcagaatctgaagcctgtagtcagtttctggtcggcggcacaccttcctcagtggaacaatttcctcagaagagtcatgatcatagcgaacaagaaatctacaacggcaacctctaacatcatgccttctcctttgagcatcaaggacatgagcatcataatagagagcctgatctttaccttcctgaaaacaaagaatcaggtccccaggaagcacagcaacacattctgtggcctcgcatggaagagaacgttgtcgcacacatttgcgaacattgatccattcatcctcctctgccccaaatccagaaaaacgaacccgcacctccgggtcaccggattcaaacaacctatgtgacagaaaggcagcaacatcataccatgcaccatcacgagctgacttggcctcaaactcaactgagacactttccacaggattcttccctgtagaggaggagccgtggtgcgcagcagcaacagaagagagctgagcagccctgaaggcggaggcgttagcggcatgctgctggtgatca

SEQ ID NO: 433 - protein, 313 aa, Zea mays
MGRPPSAGAPAFRFLPSEVAEMEARLLQLNNGIPTRAVLQTLADKFSASPERAGKVAIQPKQVWNWFQNRRYSHRAKTPRAASSPPAKMTPSGADHQQHAANASAFRAAQLSSVAAAHHGSSSTGKNPVESVSVEFEAKSARDGAWYDVAAFLSHRLFESGDPEVRVRFSGFGAEEDEWINVRKCVRQRSLPCEATECVAVLPGDLILCFQEGKDQALYYDAHVLDAQRRRHDVRGCRCRFLVRYDHDSSEEIVPLRKVCRRPETDYRLQILHAARARSRHVQIFPLPPERLKWSWHPMLRAHMSKTPRSSPR

SEQ ID NO: 434 - DNA, 1170 bp, Zea mays
atgggtcgtccgccgagcgccggtgctccggcgttccgcttcctcccgtccgaggtggcggagatggaggcgcgcctgctgcagctcaacaacggcatccccacccgcgccgtgctgcagaccctcgcggataaattctccgcttcgcccgagcgcgctggcaaggtggccatccagcccaagcaggtgtggaactggtttcagaacagacggtactcacaccgggccaaaactcccagggccacgtcgtcaccgccggctaagatgacgccctcgggagctgatcaccagcagcatgccgctaacgcctccgccttcagggctgctcagctctcttctgtcgctgctgcgcaccacggttcctcctctacagggaagaatcctgtggaaagtgtctcagttgagtttgaggccaagtcagctcgtgatggtgcatggtatgatgttgctgcctttctttcacataggttgtttgaatccggtgacccggaggtgcgggttcgtttttctggatttggggcagaggaggatgaatggataaatgttcgcaaatgtgtgcgacaacgttctcttccatgcgaggccacagaatgtgttgctgtgcttcctggggacctgattctttgttttcaggaaggtaaagatcaggctctctattatgatgctcatgtccttgatgctcaaaggagaaggcatgatgttagaggttgccgttgtagatttcttgttcgctacgaccatgattcttctgaggaaattgttccactgaggaaggtgtgccgccgaccggaaactgactacaggcttcagattctgcatgcggctagagcggcagccacgaatgcagatgttcacactccacccaaagaggttaaggtggagttggcgtccactgataaaagcccagccgagcagaaaccccagaagcagcacaagatgatggacgtgaacactgatgaggtgaccatggtctccaccttggagcaagatgagacaccaggcaagactgtagcccccgtaccgtcagccactgcagaaacccgcaattcaagttcggacacagtgatgaaaggtgctgaggcttcctcggtcgttgaagatgacgatgaagtgcaggcagttgacaagatgaaagaggggagaagttttattcccttatcttttggttag

SEQ ID NO: 435 - protein, 389 aa, Zea mays
MGRPPSAGAPAFRFLPSEVAEMEARLLQLNNGIPTRAVLQTLADKFSASPERAGKVAIQPKQVWNWFQNRRYSHRAKTPRATSSPPAKMTPSGADHQQHAANASAFRAAQLSSVAAAHHGSSSTGKNPVESVSVEFEAKSARDGAWYDVAAFLSHRLFESGDPEVRVRFSGFGAEEDEWINVRKCVRQRSLPCEATECVAVLPGDLILCFQEGKDQALYYDAHVLDAQRRRHDVRGCRCRFLVRYDHDSSEEIVPLRKVCRRPETDYRLQILHAARAAATNADVHTPPKEVKVELASTDKSPAEQKPQKQHKMMDVNTDEVTMVSTLEQDETPGKTVAPVPSATAETRNSSSDTVMKGAEASSVVEDDDEVQAVDKMKEGRSFIPLSFG

SEQ ID NO: 436 - DNA, 858 bp, Zea mays
atggatcggcggcaatcaagcagcagcgggatgatggagggaccgttccgattcttgccggccgaagtgaaagagatggaggagcgcctgttcccggtcaccaatcgcaggctggatcacatcctcatggatgagctcgctctgaaatttagctgcttccggcgccgtgctggcatggttcccgtcaagccaaagcaggtgctcaactggttttataacaaccgtaacaagacttctgccaaggtagcagccagggaagcacatgctccatgggagttttgggccaaccatcagcaagctagagctagaggaggctcatccatcagcaagctgaagccaaagaaggcgactacgcacgcaggatcttcctcagggaataattatatcgatgtatatcacaccaagtttgaagctaagtcagctagagatggctcttggtaccttgtcgaagaattcttgactgaaaagttttgtgaatcaggcgatttgcaagtattggttcgctttcctggatttggagttgaggaagctgaatggatcgatgttcgtacatgtactttgcggcaacgctcagtgccatacaaggccacagaatgtgcagatgttcatatttgggaccctgttctttgttacaaggtaagtgaacagagtggtctctattttgatgctgaagtgcatgctattgaaaggaaaacacataattcaggagaagaatgtgattgcaaaatccttgttctttatgtgcatgataattctgaggacatcgtttccttgaagaagttgcgccgtcgatacgtagaatatgactacaaacctcaaacttcgtatgagctgccaaaaggaacgaaaatagcttaa

SEQ ID NO: 437 - protein, 285 aa, Zea mays
MDRRQSSSSGMMEGPFRFLPAEVKEMEERLFPVTNRRLDHILMDELALKFSCFRRRAGMVPVKPKQVLNWFYNNRNKTSAKVAAREAHAPWEFWANHQQARARGGSSISKLKPKKATTHAGSSSGNNYIDVYHTKFEAKSARDGSWYLVEEFLTEKFCESGDLQVLVRFPGFGVEEAEWIDVRTCTLRQRSVPYKATECADVHIWDPVLCYKVSEQSGLYFDAEVHAIERKTHNSGEECDCKILVLYVHDNSEDIVSLKKLRRRYVEYDYKPQTSYELPKGTKIA

SEQ ID NO: 438 - protein, 72 aa, Artificial sequence
  Homeodomain
NGGPSFRFMQYEVTEMDAILQEHHNMMPAREVLVSLAEKFSESSERKGKIQVQMKQVWNWFQNRRYAIRAKS

SEQ ID NO: 439 - protein, 50 aa, Artificial sequence
  SAWADEE domain - motif 4
  VARIANT (1)..(1): / replace = "Val"
  VARIANT (5)..(5): / replace = "Val"
  VARIANT (13)..(13): / replace = "Asp"
  VARIANT (18)..(18): / replace = "Tyr"
  VARIANT (24)..(24): / replace = "Glu"
  VARIANT (25)..(25): / replace = "Ala"
  VARIANT (28)..(28): / replace = "Lys"
  VARIANT (29)..(29): / replace = "Leu"
  VARIANT (32)..(32): / replace = "Ile"
  VARIANT (38)..(38): / replace = "Ile"
  VARIANT (40)..(40): / replace = "Val"
PGDLILCFQEGKEQALYFDAHVLDIQRRRHDVRGCRCRFLVRYDHDQSEE

SEQ ID NO: 440 - protein, 21 aa, Artificial sequence
  SAWADEE domain - motif 5
  VARIANT (3)..(3): / replace = "Leu"
  VARIANT (7)..(7): / replace = "Ser"
  VARIANT (11)..(11): / replace = "Pro"
  VARIANT (17)..(17): / replace = "Ile"
  VARIANT (20)..(20): / replace = "Lys"
  VARIANT (21)..(21): / replace = "Arg"
EVRVRFAGFGAEEDEWVNVRK

SEQ ID NO: 441 - protein, 15 aa, Artificial sequence
  SAWADEE domain - motif 6
  VARIANT (1)..(1): / replace = "Lys"
  VARIANT (10)..(10): / replace = "Ser" / replace = "Thr"
  VARIANT (13)..(13): / replace = "Thr"
  VARIANT (14)..(14): / replace = "Tyr"
RDGAWYDVAAFLSHR

SEQ ID NO: 442 - protein, 132 aa, Artificial sequence
  SAWADEE domain
FEAKSGRDGAWYDVGTFQSHRYLDKGDPEVLVRFAGFGPDEDEWLNVCKHVRQRSLPCEASECVAVLPGDLILCFQEGKDQALYFDAHVLDAQRRRHDVRGCRCRFLVRYDHDQSEEIVPLRKICRRPETDY

SEQ ID NO: 443 - DNA, 2194 bp, Oryza sativa; identical to SEQ ID NO: 321

SEQ ID NO: 444 - DNA, 3990 bp, Artificial sequence
  expression cassette
aatccgaaaagtttctgcaccgttttcaccccctaactaacaatatagggaacgtgtgctaaatataaaatgagaccttatatatgtagcgctgataactagaactatgcaagaaaaactcatccacctactttagtggcaatcgggctaaataaaaaagagtcgctacactagtttcgttttccttagtaattaagtgggaaaatgaaatcattattgcttagaatatacgttcacatctctgtcatgaagttaaattattcgaggtagccataattgtcatcaaactcttcttgaataaaaaaatctttctagctgaactcaatgggtaaagagagagattttttttaaaaaaatagaatgaagatattctgaacgtattggcaaagatttaaacatataattatataattttatagtttgtgcattcgtcatatcgcacatcattaaggacatgtcttactccatcccaatttttatttagtaattaaagacaattgacttatttttattatttatcttttttcgattagatgcaaggtacttacgcacacactttgtgctcatgtgcatgtgtgagtgcacctcctcaatacacgttcaactagcaacacatctctaatatcactcgcctatttaatacatttaggtagcaatatctgaattcaagcactccaccatcaccagaccacttttaataatatctaaaatacaaaaaataattttacagaatagcatgaaaagtatgaaacgaactatttaggtttttcacatacaaaaaaaaaaagaattttgctcgtgcgcgagcgccaatctcccatattgggcacacaggcaacaacagagtggctgcccacagaacaacccacaaaaaacgatgatctaacggaggacagcaagtccgcaacaaccttttaacagcaggctttgcggccaggagagaggaggagaggcaaagaaaaccaagcatcctcctcctcccatctataaattcctccccccttttcccctctctatataggaggcatccaagccaagaagagggagagcaccaaggacacgcgactagcagaagccgagcgaccgccttcttcgatccatatcttccggtcgagttcttggtcgatctcttccctcctccacctcctcctcacagggtatgtgcccttcggttgttcttggatttattgttctaggttgtgtagtacgggcgttgatgttaggaaaggggatctgtatctgtgatgattcctgttcttggatttgggatagaggggttcttgatgttgcatgttatcggttcggtttgattagtagtatggttttcaatcgtctggagagctctatggaaatgaaatggtttagggtacggaatcttgcgattttgtgagtaccttttgtttgaggtaaaatcagagcaccggtgattttgcttggtgtaataaaagtacggttgtttggtcctcgattctggtagtgatgcttctcgatttgacgaagctatcctttgtttattccctattgaacaaaaataatccaactttgaagacggtcccgttgatgagattgaatgattgattcttaagcctgtccaaaatttcgcagctggcttgtttagatacagtagtccccatcacgaaattcatggaaacagttataatcctcaggaacaggggattccctgttcttccgatttgctttagtcccagaattttttttcccaaatatcttaaaaagtcactttctggttcagttcaatgaattgattgctacaaataatgcttttatagcgttatcctagctgtagttcagttaataggtaatacccctatagtttagtcaggagaagaacttatccgatttctgatctccatttttaattatatgaaatgaactgtagcataagcagtattcatttggattattttttttattagctctcaccccttcattattctgagctgaaagtctggcatgaactgtcctcaattttgttttcaaattcacatcgattatctatgcattatcctcttgtatctacctgtagaagtttctttttggttattccttgactgcttgattacagaaagaaatttatgaagctgtaatcgggatagttatactgcttgttcttatgattcatttcctttgtgcagttcttggtgtagcttgccactttcaccagcaaagttcatttaaatcaactagggatatcacaagtttgtacaaaaaagcaggcttaaacaatgggtcgtcctcccagtaatggcggtccttcctttcgcttcatgcagtatgaggtcacggagatggacgctattttgcaagaacaccataacatgatgccagctcgtgaggttcttgtatctcttgcagagaagttcagtgagtcttcagagcgaaaagggaagattcaagtgcaaatgaaacaagtttggaattggttccaaaatagacggtatgcaataagggcaaaatcaaataaggccccgatgaagttaaatataacacctatgcctcgcgatgattcagctgctgcgaggagtgtgcctcaacaagcagctgctcctatacctgatgctgtgccagccactacatctgcttcttcagctgctggtgccagaagggcaacttcagaaaactcttatatggaatttgaagccaaatctggtagagatggtgcatggtatgatgtaggaaccttccaatcccatagatacttggacaagggggatccggaagtattggttcggtttgctggttttggacctgatgaagatgagtggcttaatgtttgcaagcatgtcaggcagcgttctctcccttgcgaagcatcggaatgtgttgcagttcttcctggagacctcatactctgttttcaggaaggcaaagatcaggctctgtattttgatgctcatgttcttgatgcacaaagacgaagacatgatgtaagaggttgccgttgtaggtttttggtgcgttatgatcatgaccagtctgaggaaattgtgccactaaggaagatttgtcggaggcctgaaactgattataggctgctacaacttcatgctgcaaatgactcagcagctactgaccagcagaaaactagtgtagatccctccatagcaagtaccctgagggttgctgcttctgccacagaaacaatgctgcagcagcaacataacacaggtgtagcagctccggtttcccaagccaatgtttctcaacctgccaaaacaataattgcggagccaaaagaggctgcaaccctcagtgctgtcgattctggaaatcctagtttcatctccactgctgtgtttcccagcgttacggctaccgctgctgtgttggcgagtggaatggctacgagtaacggccctggtggctctggagagaacatgcagggaattaaattgtagtttgatgtaccttgatagctgctctgtttcaacccagctttcttgtacaaagtggtgatatcacaagcccgggcggtcttctagggataacagggtaattatatccctctagatcacaagcccgggcggtcttctacgatgattgagtaataatgtgtcacgcatcaccatgggtggcagtgtcagtgtgagcaatgacctgaatgaacaattgaaatgaaaagaaaaaaagtactccatctgttccaaattaaaattcattttaaccttttaataggtttatacaataattgatatatgttttctgtatatgtctaatttgttatcatccgggcggtcttctagggataacagggtaattatatccctctagacaacacacaacaaataagagaaaaaacaaataatattaatttgagaatgaacaaaaggaccatatcattcattaactcttctccatccatttccatttcacagttcgatagcgaaaaccgaataaaaaacacagtaaattacaagcacaacaaatggtacaagaaaaacagttttcccaatgccataatactcgaac

SEQ ID NO: 445 - DNA, 53 bp, Artificial sequence
  primer: prm14262
ggggacaagtttgtacaaaaaagcaggcttaaacaatgggtcgtcctcccagt

SEQ ID NO: 446 - DNA, 51 bp, Artificial sequence
  primer: prm14263
ggggaccactttgtacaagaaagctgggttgaaacagagcagctatcaagg

SEQ ID NO: 447 - DNA, 987 bp, Solanum lycopersicum
atgacagacagcaaggtagagactctatcaaggttagctcaatggaggatcgacaatttcacagcatctacttacaaaagatctgacccttttaaaattggtatatggaactggcatctgtcaattgagaagaatcggtatttgtatattcgattgtttcctgaaccttctcggctttcgaaagagcagcttcctcctccttttgctcgctttatgcttcgtgttactacaactggaaccaatcggagacctcatatatctcctgtatatgagaggctgcttcgaacaagtgatgactttgtgtggcctattgattcttgtttacaaggtcgatttgtcattgatgttgagttccttgacctgaagatctacaccccaaatggtggagaaggaaaatctatatggcccaatgacatgattttgcaatctttagctacccaaagtactctccgatgcctctctcgcatgcttgatgagtccatccatactgatgttaccattaatacggctgatggatcagtgcaagctcacagagcgatactgtctgctacttctcctgtattccacagcatgttccttcacgatctcagggagaaagagtcctctataatcgacatagaagacatgtcaacagaatcatgcacagcgcttcttagttacttgtatggaaccataaaacaagaggatctctggaagcaccgattggcattactgggtgcggcaaacaagtatgatattgtagatttgaagaatgcttgtgaggaaagtctcctagaagacatcaactcgggtaatgtcctcgaaagactgcaagaggcctggctttaccagctaaataaattgaaaaaaggttgcttgatgtatttgttcgattttggcaagatttatgatgttagggaggaaattaacaacttcttcagacaggcagatagagatctgatgctagagatgtttcaagaagtgctcacagtttggaagcctgcctaa

SEQ ID NO: 448 - protein, 328 aa, Solanum lycopersicum
MTDSKVETLSRLAQWRIDNFTASTYKRSDPFKIGIWNWHLSIEKNRYLYIRLFPEPSRLSKEQLPPPFARFMLRVTTTGTNRRPHISPVYERLLRTSDDFVWPIDSCLQGRFVIDVEFLDLKIYTPNGGEGKSIWPNDMILQSLATQSTLRCLSRMLDESIHTDVTINTADGSVQAHRAILSATSPVFHSMFLHDLREKESSIIDIEDMSTESCTALLSYLYGTIKQEDLWKHRLALLGAANKYDIVDLKNACEESLLEDINSGNVLERLQEAWLYQLNKLKKGCLMYLFDFGKIYDVREEINNFFRQADRDLMLEMFQEVLTVWKPA

SEQ ID NO: 449 - DNA, 909 bp, Gossypium hirsutum
atgggtgattcaaaggtcgaaaccatttccagattagctcaatggaggatcgacaactttagtccttgttcttacaaaaaatccgaccccttcaaggtcggtctttggaactggcacttgtctatagagaagaatcgatatatgtatattcgattatttcctgagccatctcgtgtgtctaaggagcagcctccttatgctaaattcatactcaggatctctaatgttggtgctaatcgtagactttatatctccccagttcatgatagaccgctgcgaacgtgtgatgacttttattggcctgttgattcttcattccatggacgcttcattattgatgttgagttcctggaccttaggatctgccccataaatggtggtgaaaccgtttcaatatggcctatggatggagcaatccagtctatgtcaactcaaacaaccctatgctgccttgctcgcatgcttgatgaaggtcttcatgcggatgttactatcaagactgctgaaggtactctaagagcacacaaagcagttctatctgcaagttctcctgttttcgagagtatgttccatcacaaccttaaggaaaaggagtcatccacaatccatatagatgacatgtcactggagtcttgcagggcccttctcaattacttgtatggaacaataaaccaagaggacttttggaagcatcgactgccattactgggagctgcaaataaatacgacattgtggatctcaaagatgcttgtgaggaaagccttctagaaaacatccactctcagaatgtctttgagaggctgcaggaggtttggctttaccaattgacaaacttgaaaaaggggggatgaacatacttgtttgatttcggaaaaaaatttgaagttaaagaaaaaatcaaaaacttt

SEQ ID NO: 450 - protein, 302 aa, Gossypium hirsutum
MGDSKVETISRLAQWRIDNFSPCSYKKSDPFKVGLWNWHLSIEKNRYMYIRLFPEPSRVSKEQPPYAKFILRISNVGANRRLYISPVHDRPLRTCDDFYWPVDSSFHGRFIIDVEFLDLRICPINGGETVSIWPMDGAIQSMSTQTTLCCLARMLDEGLHADVTIKTAEGTLRAHKAVLSASSPVFESMFHHNLKEKESSTIHIDDMSLESCRALLNYLYGTINQEDFWKHRLPLLGAANKYDIVDLKDACEESLLENIHSQNVFERLQEVWLYQLTNLKKGGTYLFDFGKKFEVKEKIKNF

SEQ ID NO: 451 - DNA, 951 bp, Populus trichocarpa
atggcagattcaaaggtagataccatctcccgactagcccagtggaggatcgagaactttggctctttctcttacaaaaaatccgatcctttcaaggtcggaatctggaactggcacttgtctatagagaagaatcggtacttgtacattcgtttatttccagagccgtctcgagcttccaaagaacagcctcctatcgctagatttgttcttcgtgtctcaaatgctgttcatgagagatcgctccggacaagtgaggactttgtctggcctgttgattcttcgtttcatggtcgcctcatcattgatgttgagtttctagacctcaaaatctgccctctgaatggtggggaagcgagttctatatggccaggtgatggaatgatgccgtctgtttcaactcaaggcacacttcgctgtctctctcgcatgctggatgaggccatccatgctgacgttaccattcatactgctgatggcaccctgagtgcacacaaggcaattctttctgcaagttcacctgttttcgagagcatgttcgaccacggcctcaaggaaaaggagtcctccacaatcgacatagaagatatgacactggaatcttgcatgactctcttgagttacttgtatggaaccatcaagcaagaggatttttggaagcaccgtgtgtcactgctgggggcggcgaacaaatatgacattgcagccctcaaggatgcttgcgaggaaagcctcctggaagacatcaataccatgaatgtccttgagaggatgcaagaggcttggctttaccagttgaacaagctgaagaaaggatgcttggcttacttgtttgactttggaaaaatatatgatgttagagatgaaatcggtaagtttttcaggcatgccgacaaggaattgatggtagaaatgtttgaagaggtgcttacggtttggaaacctgtataa

SEQ ID NO: 452 - protein, 316 aa, Populus trichocarpa
MADSKVDTISRLAQWRIENFGSFSYKKSDPFKVGIWNWHLSIEKNRYLYIRLFPEPSRASKEQPPIARFVLRVSNAVHERSLRTSEDFVWPVDSSFHGRLIIDVEFLDLKICPLNGGEASSIWPGDGMMPSVSTQGTLRCLSRMLDEAIHADVTIHTADGTLSAHKAILSASSPVFESMFDHGLKEKESSTIDIEDMTLESCMTLLSYLYGTIKQEDFWKHRVSLLGAANKYDIAALKDACEESLLEDINTMNVLERMQEAWLYQLNKLKKGCLAYLFDFGKIYDVRDEIGKFFRHADKELMVEMFEEVLTVWKPV

SEQ ID NO: 453 - DNA, 975 bp, Glycine max
atgtccgattcgaaggtcgaaaccatcgccagattagcccaatggaaaatcgacaacttcggaccctgctccttcaagagatcagatcctttcaagctcggaatttggaactggttcatgtccatagagaggaacaggtacctctacatacacatctttccagagccttctcggctttctaaggaacagccacccgtggcgcgcttcatcctgcgagtctccaatagctctggccctacccgcaaagtttacatttcccctgttcatgaaagggttcttcggacaagtgaggactttgtctggcctgttgatactgcattccttggtcgcttcgttattgatattgagtttcttgacttgaggacctgccctgtgaatggtgaaaccagatctgtttggccatctgatggaaaactgcaaactgttgcagctcaaagcactcttcgatgcctgtctcacatgcttgatgaggctatacatgctgacctcaccattatcaccgcagatggtactctgagggctcataaggcagttttatctgctagttctactgtgttgcatagcttgtatcttgacaatggtgatgaaaaagagacatctactatcaacatggaagatatgtctcaagagtcctgcatggcccttctgagttacttgtacggcactataaaacaagaagatttctggaaacacaggcttgcattgcttggagcagccgataaatacgagattggagatcttaaagatgcctgtgaggaaagcctactggaagatcttaactcgggaaatgttctggataggttaaatgatgcttggctttaccagttgcaagcgttaaagaaaggatgtttctcatacttattttattatggtaagatttatgatgttagagacgaaatggatacctttttccgacatgcagatagggagctaatgctggagatgtttcaggaagtgcttacaatttcgaaatag

SEQ ID NO: 454 - protein, 324 aa, Glycine max
MSDSKVETIARLAQWKIDNFGPCSFKRSDPFKLGIWNWFMSIERNRYLYIHIFPEPSRLSKEQPPVARFILRVSNSSGPTRKVYISPVHERVLRTSEDFVWPVDTAFLGRFVIDIEFLDLRTCPVNGETRSVWPSDGKLQTVAAQSTLRCLSHMLDEAIHADLTIITADGTLRAHKAVLSASSTVLHSLYLDNGDEKETSTINMEDMSQESCMALLSYLYGTIKQEDFWKHRLALLGAADKYEIGDLKDACEESLLEDLNSGNVLDRLNDAWLYQLQALKKGCFSYLFYYGKIYDVRDEMDTFFRHADRELMLEMFQEVLTISK

SEQ ID NO: 455 - DNA, 975 bp, Glycine max
atgtccgattcgaaggtcgaaaccatcgccagattagcccaatggaaaatcgacaacttcggaccctgctcctacaagaaatcagaccctttcaagctcggaatttggaactggttcatgtccatagagaggaacaggtacctctacatacacatctttccggagccttctcggcttactaaggaacagccacccgtggcacgcttcatcctgcgagtctccaacaactctggccctacccgcaaattttacatttcccctgttcatgaaagggtgcttaggacatgtgaagactttgtctggcctgttgatactgcattccttggtcgcttcgttattgatattgaatttcttgacctgaggacctgccccgtgaatggtgaaaccagatctgtatggccatctgatggaaaactgcaaactgttgcagctcaaagcactcttcgatgcttgtcccgtatgcttgatgaggctatacatgctgacctcaccattatcactgcagatggtaccctgagggctcataaggcagttttatctgcaagttctactgtgttccatagcttgtatcttcacaatggtgatgagaaagagacatctacaatccacatagaagatatgtctcaagaatcctgcatggcccttctgagttacttgtacggcactataaagcaacaagatttctggaagcacaggcttgcattgcttggagcagccaataaatatgagattggtgatctcaaagatgccagtgaggaaagcctactggaagatcttaactcgggaaatgttctggataggctaaatgatgcgaggctttaccagttgcacaagttaaagaaaggatgtttctcatacttatttgattttggtaagatatatgatgttagagatgaaatagatacctttttccgacatgcagatagggagctaatgctggagatgtttcaggaagtgcttacaatttcaaaatag

SEQ ID NO: 456 - protein, 324 aa, Glycine max
MSDSKVETIARLAQWKIDNFGPCSYKKSDPFKLGIWNWFMSIERNRYLYIHIFPEPSRLTKEQPPVARFILRVSNNSGPTRKFYISPVHERVLRTCEDFVWPVDTAFLGRFVIDIEFLDLRTCPVNGETRSVWPSDGKLQTVAAQSTLRCLSRMLDEAIHADLTIITADGTLRAHKAVLSASSTVFHSLYLHNGDEKETSTIHIEDMSQESCMALLSYLYGTIKQQDFWKHRLALLGAANKYEIGDLKDASEESLLEDLNSGNVLDRLNDARLYQLHKLKKGCFSYLFDFGKIYDVRDEIDTFFRHADRELMLEMFQEVLTISK

SEQ ID NO: 457 - DNA, 975 bp, Glycine max
atgtccgattcgaaggtcgaaaccatcgccagattagcccaatggaaaatcgacaacttcggaccctgctcctacaagagatcagatcctttcaagctcggaatttggaactggttcatgtccatagagaggaacaggtacctctacatacacatctttccggagccttctcggcttactaaggaacagccacccgtggcacgcttcatcctgcgagtctccaacaactctggccctacccgcaaattttacatttcccctgttcatgaaagggtgcttcggacatgtgaagactttgtctggcctgttgatactgcattccttggtcgcttcgttattgatattgaatttcttgacctgaggacctgccccgtgaatggtgaaaccagatctgtatggccatctgatggaaaactgcaaactgttgcagctcaaagcactcttcgatgcttgtcccgtatgcttgatgaggctatacatgctgacctcaccattatcactgcagatggtaccctgagggctcataaggcagttttatctgcaagttctactgtgttccatagcttgtatcttcacaatggtgatgagaaagagacatctacaatccacatagaagatatgtctcaagaatcctgcatggcccttctgagttacttgtacggcactataaagcaacaagatttctggaagcacaggcttgcattgcttggagcagccaataaatatgagattggtgatctcaaagatgccagtgaggaaagcctactggaagatcttaactcgggaaatgttctggataggttaaatgatgcttggctttaccagttgcaagcgttaaagaaaggatgtttctcatacttattttattatggtaagatttatgatgttagagatgaaatggatacctttttccgacatgcagatagggagctaatgctggagatgtttcaggaagtgcttacaatttcgaaatag

SEQ ID NO: 458 - protein, 324 aa, Glycine max
MSDSKVETIARLAQWKIDNFGPCSYKRSDPFKLGIWNWFMSIERNRYLYIHIFPEPSRLTKEQPPVARFILRVSNNSGPTRKFYISPVHERVLRTCEDFVWPVDTAFLGRFVIDIEFLDLRTCPVNGETRSVWPSDGKLQTVAAQSTLRCLSRMLDEAIHADLTIITADGTLRAHKAVLSASSTVFHSLYLHNGDEKETSTIHIEDMSQESCMALLSYLYGTIKQQDFWKHRLALLGAANKYEIGDLKDASEESLLEDLNSGNVLDRLNDAWLYQLQALKKGCFSYLFYYGKIYDVRDEMDTFFRHADRELMLEMFQEVLTISK

SEQ ID NO: 459 - DNA, 981 bp, Vitis vinifera
atgggggattcaaaggtggagacaatctcgagactagctcagtggaggatcgacaactttggaccctgttccttcaaaaagtccgatccattcaaggtcggaatctggaactggcacttatctattgagaagaataggtatatgtatattcgtctatttccggagccctccagagcttcaaaagaacagcctcctatagctagatttgttctccgcgtctccaattccgccgcctccaggaggccgtacatctcccctattcatgagagactgcttcggaccagtgatgactttgtctggcctgttgattccacctttcatggccgcttcgtcattgatgtcgagtttctggacttgaagatatgcccattgaatggtggggaagccagctcaatatggcccagtgatggagtgatgcaatctctagcagctcaaagcactcttcggtgcctctctcgcatgcttaatgaggcaatccatgccgatgtcaccattaacactgctgatggcactctaagagctcacaaggcaattttatcagcaagttcccctgtgttccaaagcatgttccttcacaacctcaaggagaagtcgtcctctacaatcgacatagaagacttgtctctggaatcttgcatggctctacttagttacttgtatggcaacataaaacaagaggatttctggaagcaccggctggcactgctgggagcggcaaacaagtatgacattacagacctaaaagatgcctgtgaggaaagcctattggaagacatcaactccggaaatgtcttggagaggctgcaggaagcatggctttaccagcttaacaagctcaaaaaaggatgcttgatgtacttactcgattttggtaagatatatgatgttagagaggaaatgaataacttcttcaggcaggctgacagggaactgatgctggagatgtttcaggaggtgcttacagtttggaaaccagcttaa

SEQ ID NO: 460 - protein, 326 aa, Vitis vinifera
MGDSKVETISRLAQWRIDNFGPCSFKKSDPFKVGIWNWHLSIEKNRYMYIRLFPEPSRASKEQPPIARFVLRVSNSAASRRPYISPIHERLLRTSDDFVWPVDSTFHGRFVIDVEFLDLKICPLNGGEASSIWPSDGVMQSLAAQSTLRCLSRMLNEAIHADVTINTADGTLRAHKAILSASSPVFQSMFLHNLKEKSSSTIDIEDLSLESCMALLSYLYGNIKQEDFWKHRLALLGAANKYDITDLKDACEESLLEDINSGNVLERLQEAWLYQLNKLKKGCLMYLLDFGKIYDVREEMNNFFRQADRELMLEMFQEVLTVWKPA

SEQ ID NO: 461 - DNA, 981 bp, Gossypium raimondii
atgggtgattcaaaggtcgaaaccatttccagattagctcaatggaggatcgacaactttagtccttgttcttacaaaaaatccgaccccttcaaggtcggtctttggaactggcacttgtctatagagaagaatcgatatatgtatattcgattatttcctgagccatctcgtgtgtctaaggagcagcctccttatgctaaattcatactcaggatctctaatgttggtgctaatcgtagactttatatctccccagttcatgatagaccgctgcgaacgtgtgatgacttttattggcctgttgattcttcattccatggacgcttcattattgatgttgagttcctggaccttaggatctgccccataaatggtggtgaaaccgtttcaatatggcctatggatggagcaatccagtctatgtcaactcaaacaaccctatgctgccttgctcgcatgcttgatgaaggtcttcatgcggatgttactatcaagactgctgaaggtactctaagagcacacaaagcagttctatctgcaagttctcctgttttcgagagtatgttccatcacaaccttaaggaaaaggagtcatccacaatccatatagatgacatgtcactggagtcttgcagggcccttctcaattacttgtatggaacaataaaccaagaggacttttggaagcatcgactgccattactgggagctgcaaataaatacgacattgtggatctcaaagatgcttgtgaggaaagccttttagaagacatcaactctcagaatgtccttgagaggctgcaggaggcttggctttaccaattgaccaagctgaaaaaggggtgcatgacatacttgtttgatttcggaaagatatatgatgttagagatgaaatcaataactttttcaggcaggcagaccgagaactgatgctggatatgtttcaagaagtgctgactgtttggaaaccggtatga

SEQ ID NO: 462 - protein, 326 aa, Gossypium raimondii
MGDSKVETISRLAQWRIDNFSPCSYKKSDPFKVGLWNWHLSIEKNRYMYIRLFPEPSRVSKEQPPYAKFILRISNVGANRRLYISPVHDRPLRTCDDFYWPVDSSFHGRFIIDVEFLDLRICPINGGETVSIWPMDGAIQSMSTQTTLCCLARMLDEGLHADVTIKTAEGTLRAHKAVLSASSPVFESMFHHNLKEKESSTIHIDDMSLESCRALLNYLYGTINQEDFWKHRLPLLGAANKYDIVDLKDACEESLLEDINSQNVLERLQEAWLYQLTKLKKGCMTYLFDFGKIYDVRDEINNFFRQADRELMLDMFQEVLTVWKPV

SEQ ID NO: 463 - DNA, 981 bp, Breassica napus
atgggggacacgaaggtggagacaatctcgaggttagcacaatggcggattgaaaactttggaccttgctctttcaaaaagtccgatcctttcaaagttggaatctggaattggcatctgtctatagagaggaatcgttacctatccgttaggctcttcccagaactctctcgtgtgtccaaggaacaacctcctattgctaaatttgttcttcgtgtctccaacgttggccctaaccgtaggctatacatctctcctgtctatgagaagctgctgcgtacgactgatgattgtgtgtggcatgtggactcaagcttccacggtcggttcaccattgatgtcgagttccttgatctcaaaatctgccctctgaatggtggtgaagcttctcctgtttggccaacggatacaacaatgcaatcaatctcaactcaaaccactctcaaatgcctatcccgtatgctagaagaaaacatcctctccgatgtaaccatccacacatccggcgggaccctttccgctcacaaagccatcctctcggccagctcaaacgtcttcaaaagcatgttccatcacgacctcaaggaaaaagagtcctccaccatccacatcgacgacatgtctagagagtcttgcatggcgctcctgagctacctctacggtaacataacgcaagaagacttctggaaacacaggctcgcgcttctcggtgctgccaacaagtacgatatcacggatctgaaagcggcctgtgaggagagcctgatggaagatattaactccgggaacgtgcttgagaggctgcaagaggcgtggctttatcagctggagaaactgaagaaagggtgtttgatgtatttgtttgatttcggcaagatttatgatgtcagagaggagatcagcggtttcttcaggcaggctgatcgtgagctgatgctggagatgtttcaggaggtcttgtcggtttggaaaccggtttga

SEQ ID NO: 464 - protein, 326 aa, Breassica napus
MGDTKVETISRLAQWRIENFGPCSFKKSDPFKVGIWNWHLSIERNRYLSVRLFPELSRVSKEQPPIAKFVLRVSNVGPNRRLYISPVYEKLLRTTDDCVWHVDSSFHGRFTIDVEFLDLKICPLNGGEASPVWPTDTTMQSISTQTTLKCLSRMLEENILSDVTIHTSGGTLSAHKAILSASSNVFKSMFHHDLKEKESSTIHIDDMSRESCMALLSYLYGNITQEDFWKHRLALLGAANKYDITDLKAACEESLMEDINSGNVLERLQEAWLYQLEKLKKGCLMYLFDFGKIYDVREEISGFFRQADRELMLEMFQEVLSVWKPV

SEQ ID NO: 465 - DNA, 981 bp, Arabidopsis lyrata
atgggggacacgaaggtggagacaatctcgaggttagctcaatggaggattgaaaattttggaccttgttctttcaaaaagtccgatccttttaaagtcggaatttggaattggcatctgtctatagagaggaatcgttatctatcagtgaggcttttcccagaactttctcgagtatctaaagagcaacctcctgttgccaaatttgttcttcgtgtctccaacgttggtcctaatcgtagattctacatctctccagtgtatgaaaaactgctgcgtacaactgatgattgtgtgtggcatgtggactccagcttccatggtcgattcaccattgatgtcgaatttctggatctcaaaatctgccctttgaatggtggtgaagcttctcctgtttggccaaccgattcaacaatgcaatcaatctccacacaaaccactctcaaatgcttatcccggatgctagaggaaagcatcctaaccgatgtaatcatccacacagccgatggagcactctctgctcacaaagctatcctctcggctagctctaccgttttcaaaagcatgttccaccacgacctcaaggaaaaagaatcatccacaatccacatcgacgacatgtcaagagaatcttgcatggctctactaagttacctctacggaaacataacccaagaagagttctggaaacacaggctcgccctcctcggtgctgcaaacaaatatgacataacggatttgaaagcagcgtgcgaagaaagcctaatggaagatataaactcgagtaatgtgctcgagagactacaagaggcttggctgtatcagctggagaaactgaagaaagggtgtttgatgtatttgtttgatttcggaaagatatatgatgtcagagaagaaatcagcaatttcttcaggcaagctgatcgagaactgatgctggagatgtttcaagaggttttgtctgtgtggaaaccggtctaa

SEQ ID NO: 466 - protein, 326 aa, Arabidopsis lyrata
MGDTKVETISRLAQWRIENFGPCSFKKSDPFKVGIWNWHLSIERNRYLSVRLFPELSRVSKEQPPVAKFVLRVSNVGPNRRFYISPVYEKLLRTTDDCVWHVDSSFHGRFTIDVEFLDLKICPLNGGEASPVWPTDSTMQSISTQTTLKCLSRMLEESILTDVIIHTADGALSAHKAILSASSTVFKSMFHHDLKEKESSTIHIDDMSRESCMALLSYLYGNITQEEFWKHRLALLGAANKYDITDLKAACEESLMEDINSSNVLERLQEAWLYQLEKLKKGCLMYLFDFGKIYDVREEISNFFRQADRELMLEMFQEVLSVWKPV

SEQ ID NO: 467 - DNA, 981 bp, Arabidopsis thaliana
atgggggacacgaaggtagagacaatctcgaggttagctcaatggagaattgaaaattttggtccttgttctttcaaaaagtccgatcctttcaaagtcggaatttggaattggcatctgtctatagagaggaatcgctatctatcagtgaggctattcccagaactttctcgagtatctaaagagcaacctcctgttgccaaatttgttcttcgtgtctccaacgttggccccaatcgtagattctacatctctcctgtttatgagaagctgctgcgtacaactgatgattgtgtgtggcatgttgactccagtttccacggtcgattcaccattgatgttgagtttcttgatctcaaaatctgccctgtgaatggtggtgaagcttctcctgtttggccaaccgatgcaacaatgcaatcaatctctactcaaaccactctcaaatgcttatcccggatgctagaggaaagcatactaaccgatgtaatcatccacacagccgatggaacactctctgctcacaaagctatcctctcagctagctcaactgttttcaaaagcatgttccaccacgacctcatggaaaaggaatcatccacaatccacatagacgacatgtcgagagaatcttgcatggctctactaagttacctctacggaaacataacccaagaagagttctggaaacacaggctcgccctcctcggcgctgcaaacaagtacgacataacggatttgaaagcagcctgcgaggagagcctaatggaagatataaactcgagtaatgtgctcgagaggctacaagaagcttggctttatcagctggagaaactgaagaaagggtgtttgatgtatttgtttgatttcggaaagatttatgatgtcagagaagaaatcagcagtttcttcaggcaagctgatcgagaactgatgctggagatgtttcaagaggttttgtctgtgtggaaaccggtctaa

SEQ ID NO: 468 - protein, 326 aa, Arabidopsis thaliana
MGDTKVETISRLAQWRIENFGPCSFKKSDPFKVGIWNWHLSIERNRYLSVRLFPELSRVSKEQPPVAKFVLRVSNVGPNRRFYISPVYEKLLRTTDDCVWHVDSSFHGRFTIDVEFLDLKICPVNGGEASPVWPTDATMQSISTQTTLKCLSRMLEESILTDVIIHTADGTLSAHKAILSASSTVFKSMFHHDLMEKESSTIHIDDMSRESCMALLSYLYGNITQEEFWKHRLALLGAANKYDITDLKAACEESLMEDINSSNVLERLQEAWLYQLEKLKKGCLMYLFDFGKIYDVREEISSFFRQADRELMLEMFQEVLSVWKPV

SEQ ID NO: 469 - DNA, 981 bp, Picea glauca
atgacggattcaaaggtggagacaactgcaaggcttgcacaatggaagattgaaagcttgggttcctgttcttaccggaggtcggaccccttcatagtcggaatctggaactggcacttgtcaattgagaagaacaggtatctatatattcgtctttttcctgagcctggtcgcatttctaaggaacaaccaccaattgcaacatttgtgcttcgcatattcaatgtaggagtaagtcgacgaccttggacatcgccagtctatgataagttgctccgcagcagtgaggattttgtatggcctatagattctagctttcatggacggtttataattgatgtggagtttctggacctgaaaattgctacaatgaatggtggagaagcttgttcaatatggcccaatgaaggagcaatgcagtgtcaagcaactaagggtgcattaaaatgcctttctcgtatgttggatgatggtctccacacggatgtaactattaatactgctaatggtagtgttagagcacatcgggctgttttagcagcacgatcctctgtttttgagagtatgttcttgcatgatctcaaagagaaagaatcatcaataattaatattgaagacatatctgttgaagcttgcatggctcttctaagctacatctatggaggtatcaaacatgaggacttttggaaccacaggatagctttactgagagctgctgataaatatgacattggggacttgaaagaatcttgcgaagaaagccttttggaggatatagattctaaaaatgttcttgagaggctgcaagaggcctggctttaccagcttagtcgactgaagaagtcatgcttgatgtacttgtttgactttggaaagatctatgatgtgagggatgatttgaacatgtttttccagcatgctgacagggaattgatgattgagatgattcaagaagtgctaaatgtttggagggtaggataa

SEQ ID NO: 470 - protein, 326 aa, Picea glauca
MTDSKVETTARLAQWKIESLGSCSYRRSDPFIVGIWNWHLSIEKNRYLYIRLFPEPGRISKEQPPIATFVLRIFNVGVSRRPWTSPVYDKLLRSSEDFVWPIDSSFHGRFIIDVEFLDLKIATMNGGEACSIWPNEGAMQCQATKGALKCLSRMLDDGLHTDVTINTANGSVRAHRAVLAARSSVFESMFLHDLKEKESSIINIEDISVEACMALLSYIYGGIKHEDFWNHRIALLRAADKYDIGDLKESCEESLLEDIDSKNVLERLQEAWLYQLSRLKKSCLMYLFDFGKIYDVRDDLNMFFQHADRELMIEMIQEVLNVWRVG

SEQ ID NO: 471 - DNA, 981 bp, Picea sitchensis
atgacggagtcaaaggtggagacaactgcaaggcttgcacaatggaagattgaaagcttgggttcctgttcttaccggaggtcggaccccttcagagtcggaatctggaactggcacttgtcaattgagaagaacaggtatctatatattcgtctttttcctgagcctggtcgcatttctaaagaacaaccaccaattgcaacatttgtgcttcgcatattcaatgtaggagtaagtcgacgaccttggacatcgccagtctatgataagttgctccgcagcagtgaggattttgtatggcctatagattctagctttcatggacggtttataattgatgtggagtttctggacctgaaaattgctacaatgaatggtggagaagcttgttcaatatggcccaatgaaggagcaatgcagtgtcaagcaactaagggtgcattaaaatgcctttctcgtatgttggatgatggtctccacacggatgtaactattaatactgctaatggtagtgttagagcacatcgggctgttttagcagcacgatcctctgtttttgagagtatgttcttgcatgatctcaaagagaaagaatcatcgataattaatattgaagacatatctgttgaagcttgcatggctcttctaagctacatctatggaggtatcaaacatgaggacttttggaaccacaggatagctttactgagagctgctgataaatatgacattggggacttgaaagaatcttgcgaagaaagccttttggaggatatagattctaaaaatgttcttgagaggctgcaagaggcctggctttaccagcttagtcgactgaagaagtcatgcttgatgtacttgtttgactttggaaagatctatgatgtgagggatgatttgaacatgtttttccagcatgctgacagggaattgatgattgagatgattcaagaagtgctaaatgtttggagggtaggataa

SEQ ID NO: 472 - protein, 326 aa, Picea sitchensis
MTESKVETTARLAQWKIESLGSCSYRRSDPFRVGIWNWHLSIEKNRYLYIRLFPEPGRISKEQPPIATFVLRIFNVGVSRRPWTSPVYDKLLRSSEDFVWPIDSSFHGRFIIDVEFLDLKIATMNGGEACSIWPNEGAMQCQATKGALKCLSRMLDDGLHTDVTINTANGSVRAHRAVLAARSSVFESMFLHDLKEKESSIINIEDISVEACMALLSYIYGGIKHEDFWNHRIALLRAADKYDIGDLKESCEESLLEDIDSKNVLERLQEAWLYQLSRLKKSCLMYLFDFGKIYDVRDDLNMFFQHADRELMIEMIQEVLNVWRVG

SEQ ID NO: 473 - DNA, 981 bp, Pinus taeda
atgaccgagtcaaaggtagagacaactgcaaggcttgcacaatggaggattgaaagcttgggctcctgctcttaccggaggtctgatgccttcagagtcggaatctggaactggcacttttcaattgagaagaacaggtatctatatattcgtcttttccctgagcctggtcgcatttctaaagaacaaccaccaattgcaacatttgtgcttcgcatattcaatgtaggagtaagtcgacgaccttggacatcaccagtctatgataagttgctccgcagcagtgaggatttcgtgtggcctatagattctagctttcatggacgttttataattgatgtggagttcctggacctgaaaattgctacaatgaatggtggagaagcttgttcaatatggcccaatgaaggagcaatgcagtgtcaagcaactaagggtgcattaaaatgcctttctcgtatgttggatgatggtcttcacacagatgtaactattaatactgctaatggtagtcttagagcacatcgggctgttttagcagcgcgatcccctgtttttgagagtatgttcttgcatgatctcaaagagaaagaatcatcgataattaatattgaagacatatctgtggaagcttgcatggctcttctaagctacatctatggaggtatcaaacatgaggacttttggaaccatagaatagctttattgagggctgctgataaatatgacattggggacttgaaagaatcctgtgaagaaagccttttggaggatatagattctaaaaatgttctcgagaggctgcaagaggcctggctttaccagctaagtcgactgaagaaatcatgcttgatgtatttgtttgactttggaaagatctatgatgtgagggatgatttgaacatgtttttccaacatgctgacagggagttgatgattgagatgtttcaagaagtgctaaatgtttggagggtaggataa

SEQ ID NO: 474 - protein, 326 aa, Pinus taeda
MTESKVETTARLAQWRIESLGSCSYRRSDAFRVGIWNWHFSIEKNRYLYIRLFPEPGRISKEQPPIATFVLRIFNVGVSRRPWTSPVYDKLLRSSEDFVWPIDSSFHGRFIIDVEFLDLKIATMNGGEACSIWPNEGAMQCQATKGALKCLSRMLDDGLHTDVTINTANGSLRAHRAVLAARSPVFESMFLHDLKEKESSIINIEDISVEACMALLSYIYGGIKHEDFWNHRIALLRAADKYDIGDLKESCEESLLEDIDSKNVLERLQEAWLYQLSRLKKSCLMYLFDFGKIYDVRDDLNMFFQHADRELMIEMFQEVLNVWRVG

SEQ ID NO: 475 - DNA, 981 bp, Carthamus tinctorius
atggtggataccaaggtagagacgatatccaggttggctcaatggaggatcgataatttcggaccttgtacttacaaaaggtccgaacctttcaaaatcggcatatggaactggcaattatcagtggagaagaatcggtatctctatattcgtctgtttccagagccctctcgggtggccaaggaacagcccccgattgccaaattcatactacgggtcaccactacgggaaccaatcgcagaccttatatctcacccatccatgaaagacttcttcggacaagtgaagactttgtctggcctgttgattctacgttccatggccgcttcatcattgatgttgagtttttggacctgcaggtttattcagtaaatggtgaggaagcaagttccatatggccgaatgatggaatgttgcgatcctcagcaagcgaaagcattcttcggtgcctttctcgcatgctacacgagtcaatcgatgctgatgtcaccattaacacaggggacggaactttgaaagctcacaaggccattctttccgcaagctctccggttttccatagcatgttcctacacaaccttcaggagaaagaatcctccaccatcaacatccaggacatgtcactcgaatcctgcaccgcccttctctcttatttatacggaaccattaagcaagaggatttctggaagcaccgcctttcactactgggtgccgccaacaagtatgcgatcacgagtttgaaggatttgtgtgaggagagcttgttggaagacataaactctggtaatgttctcgagaggctgcaagaggcctggctttaccagctggataagttgaagaagggatgtttgacatatttgtttgattttgggaagatatatgatcttagagatgaaattaacaacttctttaggactgcagagagagaattgattcaggagatgtttcaagaggtgcttactgtgtggaaaccagcatag

SEQ ID NO: 476 - protein, 326 aa, Carthamus tinctorius
MVDTKVETISRLAQWRIDNFGPCTYKRSEPFKIGIWNWQLSVEKNRYLYIRLFPEPSRVAKEQPPIAKFILRVTTTGTNRRPYISPIHERLLRTSEDFVWPVDSTFHGRFIIDVEFLDLQVYSVNGEEASSIWPNDGMLRSSASESILRCLSRMLHESIDADVTINTGDGTLKAHKAILSASSPVFHSMFLHNLQEKESSTINIQDMSLESCTALLSYLYGTIKQEDFWKHRLSLLGAANKYAITSLKDLCEESLLEDINSGNVLERLQEAWLYQLDKLKKGCLTYLFDFGKIYDLRDEINNFFRTAERELIQEMFQEVLTVWKPA

SEQ ID NO: 477 - DNA, 981 bp, Centaurea maculosa
atggtggatacccaggtagagaccatatcccgattggctccatggaggattgagaatttccgaccctgtacctccaaaaaatcccaaccctttcaaatccggctatggaactggccattatcagtggagaagaatcggtatctgtatattcctctgtttcccgagccctctcgggtggcccaggaacagccccccattgcccaattcatagtacgagtcaccactaccggaacccatcgcagaccttatatctcacccattcatgaaagacttcttcggacaagtgaagactttgtctggcctgttgattctactttccatggccgcttcatcattgatgttgagtttttggacctgcaggtttattcagtaaatggtgaggaagcaagtttcatatggccgaacgacggaatgctgcgatcatctgcaaacgaaagcattctccgttgcctttcccgcatgctaaacgagtcgatcgacactgatgtcaccatcaacacgggggacggaaccttgaaagcccacaaggccattctttccgcaagctctccggttttccacagcatgttcctacacaaccttcaggagaaagaatcctccaccatcaacatccaggacatgtcgctcgagtcctgcaccgcccttctctcttatctatacggaaccattaagcaagaggatttctggaagcaccggctttcgctactgggtgcggcaaacaagtacgcgatcacgagcttgaaggatttgtgcgaggagagcttgttggaagacataaactctggtaatgttcttgagaggctgcaagaggcctggctttaccagctggataagctgaagaaggggtgtttgacatatttgtttgattttgggaagatatatgatcttagagatgagattaacaacttctttaggactgcagagagggaattgatacaggagatgtttcaagaggtgcttactgtgtggaaaccagcatag

SEQ ID NO: 478 - protein, 326 aa, Centaurea maculosa
MVDTQVETISRLAPWRIENFRPCTSKKSQPFQIRLWNWPLSVEKNRYLYIPLFPEPSRVAQEQPPIAQFIVRVTTTGTHRRPYISPIHERLLRTSEDFVWPVDSTFHGRFIIDVEFLDLQVYSVNGEEASFIWPNDGMLRSSANESILRCLSRMLNESIDTDVTINTGDGTLKAHKAILSASSPVFHSMFLHNLQEKESSTINIQDMSLESCTALLSYLYGTIKQEDFWKHRLSLLGAANKYAITSLKDLCEESLLEDINSGNVLERLQEAWLYQLDKLKKGCLTYLFDFGKIYDLRDEINNFFRTAERELIQEMFQEVLTVWKPA

SEQ ID NO: 479 - DNA, 984 bp, Medicago trunatula
atggcggatagggttgacactgttgcaagactagcacaatggaaaatcgaaaacttcggtccttgttcttacaaaaaatctgatcctttcaagctcggaatctggaattggtatttttcaatagtaaggaataggttcttctccattcatctctttccagaaccttctaaagtttctaaggaccacccacccgttgctcgtttcatacttcgtgtctccgttgctggttcttcccgcaagtttattgtttctcctgtttatgaaaggctgcttaggacacaagatgactttgtctggcctattgatactgctttcgtgggtcgcttcatcattgatgttgaatttcttgacctgaagatatgccatatgaatggcggtgaacctagttctatatggtcatctgatggaacctcgcaatgcaatgaagctcaaagaagtactctccattgcctttcccgcatgctcgatgaggctatacatgctgacctaaccattatcacttctgatggtacattgagagctcacaaggcaattttgtctgcgagttctcctgtgtttcaaagcatgtttcatcacaacctgaaggaaaaagagtcgtcaacgatccatattgaagacatgtcacttgaatcctgcactgctcttcttagttacttgtatggagcaattaaacaagtagatttcaggaaacactgtcttgcattgcttggagcagctaataagtatgatattggtggtctgaaagatttatgtgaggaaaaccttcttgaagatattaactccgacaatgttcttgagatgctaaatgaggcttggctttatcagttacacaagttaaagaaaggatgtttaacattcttatttgaatttggtaaaatatatgatgttaaaactgatgaaataaataatcttttccagcacgcagatagggagctggttatggagatgtttcatgtgatgcttacaatttccaacccagaatag

SEQ ID NO: 480 - protein, 327 aa, Medicago trunatula
MADRVDTVARLAQWKIENFGPCSYKKSDPFKLGIWNWYFSIVRNRFFSIHLFPEPSKVSKDHPPVARFILRVSVAGSSRKFIVSPVYERLLRTQDDFVWPIDTAFVGRFIIDVEFLDLKICHMNGGEPSSIWSSDGTSQCNEAQRSTLHCLSRMLDEAIHADLTIITSDGTLRAHKAILSASSPVFQSMFHHNLKEKESSTIHIEDMSLESCTALLSYLYGAIKQVDFRKHCLALLGAANKYDIGGLKDLCEENLLEDINSDNVLEMLNEAWLYQLHKLKKGCLTFLFEFGKIYDVKTDEINNLFQHADRELVMEMFHVMLTISNPE

SEQ ID NO: 481 - DNA, 984 bp, Glycine max
atgggcgatagggtggaaacgcttgccagattagcccagtggaaaatcgacaacttcggactttgttcctacaaaaaatctgaccccttcaaggtcggaatctggaactggtacttttcaatagtgaggaataggtacctctacatacatctttttccagaaccttcgcaggttttgaaggataacccaccctttgctcgattcattcttcgagtctccaatgccggatcatcccgcagctttcatatttcccctgttcaagaaaagctgcttaggacacatgacgactttgtctggcctgtggatacaacttttgttggtcgcttcatcattgatgttgagtttctagacctaaagatatgccctcctaatggtggagaaactagtcctgtatggccatctgatggaaattctcaatccattgcatttcaaagtagcattcttcgttgcctctctcgtatgcttgatgaggctatacatgctgacctaactatcatgacagccgatggaagcacgttgagagctcataaggcagttctctcagcaagttccccagtgttccagagcatgtttcatcacaacctgaaggaaaaagagtcctccacgatccatatagaagacatgtcactcgagtcctgcacggctcttctaagttacttgtatggagcaatcaagcaagaagatttctggaaacaccggcttgcattgcttggagctgctaataaatatgacattggaagtctcaaagacatctgtgaggaaagcctcctggaagatctcagcacaggaaatgttcttgagatgctaaatgaggcttggctttatcaattgcacaagttaaagaaaggatgtttggtgttcttatttcaatttggtaagatacatgatattaaagatgaaataaataattttttccagcatgcagatagggagctaatgctggagatgtttcaggaggtgctttcaatttcgaacccgatatag

SEQ ID NO: 482 - protein, 327 aa, Glycine max
MGDRVETLARLAQWKIDNFGLCSYKKSDPFKVGIWNWYFSIVRNRYLYIHLFPEPSQVLKDNPPFARFILRVSNAGSSRSFHISPVQEKLLRTHDDFVWPVDTTFVGRFIIDVEFLDLKICPPNGGETSPVWPSDGNSQSIAFQSSILRCLSRMLDEAIHADLTIMTADGSTLRAHKAVLSASSPVFQSMFHHNLKEKESSTIHIEDMSLESCTALLSYLYGAIKQEDFWKHRLALLGAANKYDIGSLKDICEESLLEDLSTGNVLEMLNEAWLYQLHKLKKGCLVFLFQFGKIHDIKDEINNFFQHADRELMLEMFQEVLSISNPI

SEQ ID NO: 483 - DNA, 987 bp, Gossypium hirsutum
atgggtgattcaaaggtcgaaaccatctccagattagctcaatggaggatcgacaactttagtccttgttcttacaaaaaatccgaccccttcaaggtcggtctttggaactggcacttgtctatagagaagaatcgatatatgtatattcgattatttcccgagccatctcgtgtgtctaaggagcagcctccttatgctaaatttatactcaggatctctaatgttggtgctaatcgtagactttatatctccccagttcatgatagaccgctgcgaacatgcgatgacttttattggcctgttgattctacattccatggacgcttcattattgatgttgagttcctggacctgaggatctgccccataaatacccagggtggtgaaactgtttcaatatggcctatggatggagcaatccagtctatgtcaactcaaacaaccctacgctgccttgctcgcatgcttgatgaaggtcttcatgcggatgttactatcaagactgctgaaggtactctaagagcacacaaagcagttctatctgcaagttctcctgttttcgagagtatgttccatcacaaccttaaggaaaaggagtcatccacaatccatatagatgacatgtcactggagtcttgcacggcccttctcaattacttgtatggaacaataaaccaagagaacttttggaagcatcgactgccattactgggagctgcaaataaatacgacattgtggatctcaaagatgcttgtgaggaaagccttctagaagacatcaactctcagaatgtccttgagaggctgcaggaggcttggctttaccaattgaccaagctgaaaaaggggtgcatgacatacttgtttgatttcggaaagatatatgatgttagagatgaaatcaataactttttcaggcaggcagaccgagaactgatgctggatatgtttcaagaagtgctgactgtttggaaaccggtatga

SEQ ID NO: 484 - protein, 328 aa, Gossypium hirsutum
MGDSKVETISRLAQWRIDNFSPCSYKKSDPFKVGLWNWHLSIEKNRYMYIRLFPEPSRVSKEQPPYAKFILRISNVGANRRLYISPVHDRPLRTCDDFYWPVDSTFHGRFIIDVEFLDLRICPINTQGGETVSIWPMDGAIQSMSTQTTLRCLARMLDEGLHADVTIKTAEGTLRAHKAVLSASSPVFESMFHHNLKEKESSTIHIDDMSLESCTALLNYLYGTINQENFWKHRLPLLGAANKYDIVDLKDACEESLLEDINSQNVLERLQEAWLYQLTKLKKGCMTYLFDFGKIYDVRDEINNFFRQADRELMLDMFQEVLTVWKPV

SEQ ID NO: 485 - DNA, 987 bp, Poncirus trifoliata
  misc_feature (461)..(461): n is a, c, g, or t
atgagcgattctgcttatagggttgataccacgtcgcgtcttgctcaatggaggatagaaaatttggcttcctgttcttatcgcaagtccgatcctttcaagatcggcaagtggaattggcatttatctctggagaagaaccggatgttatttgttaaactgtatccagaggtatcgaatttaacaagagacaatcccccaattgcttctttcgttattcgagttgtcagttctgttggagatcgtaaagctttgtctcatccagaaatcacagacaggcagctcaagaataacgacgattttgtttgggcaattgaagtcccattaactgggaaattcatcattgacgttgaatttcttgatttgaagattgcaccttcagacggtggtggaccttgttccatttgggctgaaggaatcactcaaaaacgatcaaatgcaacagctcttgcatctcttgntagaatgttgacagaaggcatccacgcagacatcattattaatgcttccaatggaagcactggagctcatcgtgctgtgcttgctgcacgatcacctgttttccgcagcatgttttctcatgacttgaaagagaaagaactctcaaccattgacatccctgacatgtcaattgatgcctgccaagcttttctcagttatatttatgggaatattgaacatgaagaattcttgacccatcgattggctcttcttcgtgcagctgataaatatgacatctgcgacttgaaagaggcatgtcatgacagccttgtagaagatattgatacaaagaatgtacttgagagactccaaaatgcatatctctatgaattgccaaaactgaagagcagttgcatgcggtatcttgtgaagtttgggaagatatttgacattcgagatgacttcagtgtcttcttgcaatgtgcagacagggaacttatagctgaagtattccatgaagttcttggtgcctggaaaggtttctga

SEQ ID NO: 486 - protein, 328 aa, Poncirus trifoliata
  misc_feature (154)..(154): Xaa can be any naturally occurring amino acid
MSDSAYRVDTTSRLAQWRIENLASCSYRKSDPFKIGKWNWHLSLEKNRMLFVKLYPEVSNLTRDNPPIASFVIRVVSSVGDRKALSHPEITDRQLKNNDDFVWAIEVPLTGKFIIDVEFLDLKIAPSDGGGPCSIWAEGITQKRSNATALASLXRMLTEGIHADIIINASNGSTGAHRAVLAARSPVFRSMFSHDLKEKELSTIDIPDMSIDACQAFLSYIYGNIEHEEFLTHRLALLRAADKYDICDLKEACHDSLVEDIDTKNVLERLQNAYLYELPKLKSSCMRYLVKFGKIFDIRDDFSVFLQCADRELIAEVFHEVLGAWKGF

SEQ ID NO: 487 - DNA, 987 bp, Glycine max
atgagcgattctgcatacagagtcgaaaccacgccgcgccttgctcaatggagaatcgaaaacttggcttcttgcacttaccgaaaatccgatcctttcaagatcggaaactggaattggcatttgtcggtggagaaaaacagggttttgtttgttaaattgttcccagaaatatccaatcttacgagagacaaccccccaattgcatctttcatcgttcgggtggttagttctgttggagatcgcaaggccatcacacatccagaaataaaggacaaagtgttaaagaacaacgaggattttgtttgggcaattgaggttccactaactggaaaattcattattgacgtagagtttcttgatttgaagactgcatccccaaacggaggagaaccttgttccatttgggcagaaggatttactcagcaaagatcaaatgcaaaagccatagagtctcttggtagaatgctaacagaaggcatccacacggacatcaccatcaatgcttctgatggaagtattggagctcatagagctgttcttgctgccagatcacccgtcttccgcagcatgttctcacataatcttcaggagaaagaattgtcaaccataaacatctcagacatgtcacttgaatcatgccaggcttttctcaattatctttatgggatcatcaaacatgaagagtttctgactcataggctggcccttctgcacgcggccgacaagtatgacatatctgatttgaaagatgtatgccatgagagtcttctagaagatattgatacaaagaatgtacttgataggctccaaaatgcatctctatatcagttgatgaaactgaagatgagttgcatccgatatcttgtgaagtttggtaaaatatatgaaattcgtgatgatttcaataccttcctgcaaaatgcagatagggatctgattgctgaggtcttccatgaagttcttgatgcttggaaaggattctga

SEQ ID NO: 488 - protein, 328 aa, Glycine max
MSDSAYRVETTPRLAQWRIENLASCTYRKSDPFKIGNWNWHLSVEKNRVLFVKLFPEISNLTRDNPPIASFIVRVVSSVGDRKAITHPEIKDKVLKNNEDFVWAIEVPLTGKFIIDVEFLDLKTASPNGGEPCSIWAEGFTQQRSNAKAIESLGRMLTEGIHTDITINASDGSIGAHRAVLAARSPVFRSMFSHNLQEKELSTINISDMSLESCQAFLNYLYGIIKHEEFLTHRLALLHAADKYDISDLKDVCHESLLEDIDTKNVLDRLQNASLYQLMKLKMSCIRYLVKFGKIYEIRDDFNTFLQNADRDLIAEVFHEVLDAWKGF

SEQ ID NO: 489 - DNA, 987 bp, Vitis vinifera
atgagcgactccgcatacagagtcgaaaccacgtcgcgcctcgcccaatggaggatcgacaacctggcttcctgcacttaccgcaagtccgatcctttcaagatcggcaagtggaattggcatttatctatagagaagaatcggacattatctgttaaactgtacccggaaacatcaaatttaaccagagacaaccccccaattgcgtctttcatcatcagagtgctctcttctgtgggagatcgcaaggctttggttcatccagaaataacagacaagcagctcaagaataacgacgatttcgtttgggcgattgaggttccattaactgggaaattcattgtcgacgttgaattcctagatttgaagacttcatcaccaaacggtggagagccttgctccatctgggctgaaggattcgctcaaaaaagatcaagtacaacagctcttgcatcccttggccggatgttgtcagaaaacatccacacagacattataattaatgcttctgatggaagcattggagctcatcgtgcggttctggcctcaatatcccctgtttttcgcagcatgttttcacatgacctcaaagagaaagaactatccaccgtaaacatctctgacatgtcaattgaagcctgccaagcttttctcaattacatttatgggaatatccaacacgatgaatttctgatccacaggctgccacttctccgtgcagctgataagtacgacattgaagacctgaaagaggcatgccatgagagtcttttagaagatattgacactaagaatgtgctggagaggctccaaaatgcatctctttatcaattgtcaaaactgaaaactgcctgcttgcgatatcttgtgaagtttggtaagatatttgacattcgagatgatttcaatgcctttctgcagtgtgcagatagggacctgattgctgaagtcttccatgaagtcctcactgcctggaaaggtttctga

SEQ ID NO: 490 - protein, 328 aa, Vitis vinifera
MSDSAYRVETTSRLAQWRIDNLASCTYRKSDPFKIGKWNWHLSIEKNRTLSVKLYPETSNLTRDNPPIASFIIRVLSSVGDRKALVHPEITDKQLKNNDDFVWAIEVPLTGKFIVDVEFLDLKTSSPNGGEPCSIWAEGFAQKRSSTTALASLGRMLSENIHTDIIINASDGSIGAHRAVLASISPVFRSMFSHDLKEKELSTVNISDMSIEACQAFLNYIYGNIQHDEFLIHRLPLLRAADKYDIEDLKEACHESLLEDIDTKNVLERLQNASLYQLSKLKTACLRYLVKFGKIFDIRDDFNAFLQCADRDLIAEVFHEVLTAWKGF

SEQ ID NO: 491 - DNA, 987 bp, Glycine max
atgagcgattctgcatacagagtccaaaccacaccgcgccttgctcaatggagaatcgaaaacttggcttcttgcacttaccgcaaatcagatcctttcaagatcggaaactggaattggcatttgtcggtggagaaaaacagggttttgtttgttaaattgttcccagaaatatccaatcttacgagagacaaccccccaattgcatctttcatcgttcgggtcgttagttctgttggaggtcgccaggccatcacacatccagaaataaaggacaaagtgttaaagaacaacgaggattttgtttgggcaattgaggttccactaactgggaaattcattattgacgtagagtttcttgatttgaagactgcatccccaaacggtggagaaccttgttccatttgggcagaaggatttactcagcaaagatcaaatgcaaaagccatagagtctcttggtagaatgctaacagaaggcattcacacagacatcaccatcaatgcttctgatggaagtataggagctcatagagctgttcttgctgccagatcacctgtcttccgcagcatgttctcacataatcttcaggagaaagagttatcaaccataaacatctcagacatgtcacttgaatcatgccaggcttttctctattatctttatgggataatcaaacatgaagagtttctgactcataggctggcccttctgcaggcggctgacaagtatgacatatctgacttgagagatgtatgccacgaaagtcttctagaagatattgacacaaagaatgtacttgagaggctccaaaatgcatctctatatcagttgatgaaactgaagatgagttgcatccgatatcttgtgaagtttggtaaaatatatgaaattcgcgatgatttcaataccttcctgcgaaatgcagatagggatctgatttctgaagtcttccatgaagttcttgatgcttggaaaggattctga

SEQ ID NO: 492 - protein, 328 aa, Glycine max
MSDSAYRVQTTPRLAQWRIENLASCTYRKSDPFKIGNWNWHLSVEKNRVLFVKLFPEISNLTRDNPPIASFIVRVVSSVGGRQAITHPEIKDKVLKNNEDFVWAIEVPLTGKFIIDVEFLDLKTASPNGGEPCSIWAEGFTQQRSNAKAIESLGRMLTEGIHTDITINASDGSIGAHRAVLAARSPVFRSMFSHNLQEKELSTINISDMSLESCQAFLYYLYGIIKHEEFLTHRLALLQAADKYDISDLRDVCHESLLEDIDTKNVLERLQNASLYQLMKLKMSCIRYLVKFGKIYEIRDDFNTFLRNADRDLISEVFHEVLDAWKGF

SEQ ID NO: 493 - DNA, 987 bp, Aquilegia sp.
atgagtgaatctgcttatagagtcgaaactcaatctcgacttgctcaatggagaattgacagtttgtcgtcttgtacttatcgcaaatcggatccttttaagattggtaactggaattggcatttatcagtcgagaagaatcgaggtgtgtatattaagttattccccgttgtatcgaatttaaccagagaaaatcccccgattgcgtcttttatcattcgtgttctctgttcacatggtaaccgccatgctctgcttcatccaggagtgactgataagcagatcaagaccaatgatgattttatttgggcgattgagactccattaactgggaagtttataattgacattgagtttttagatttaaaagcagtttcccagaacggcggtgaaccatgttctatttggtcagaaggattggtgcagagacgatcgaatgcaacagctcttgcaacacttgggagaatgttgtcagaaagtattcacacggatataacaatcaatgcttcgaatgggagcattggggcacaccgtgccatcctttcctcaagatcacctgtcttccagagcatgttttcgcacaatctcagagagaaggaactgtcaactataaacatctctgatatgtcaattgaagcttgccaagtgttcctaaattatgtctatggttctatccagcatggagagtttctgacccaccgaattgctcttctcggtgcagctgataagtatgacatttctgacctgaaagaagcatgtcatgagagcctactagaagatattgataccaagaatgtactcgagaggctccaaactgcatatctctaccaattgccaagactcaagggaagctgcatgaggtatcttataaagtttggtaagatatatgacattcgggatgatttcaacgcttttttacaaagtgcagatagggatattgtagctgaaatcttccaggaggtccttgctgcctggaaaggtttctga

SEQ ID NO: 494 - protein, 328 aa, Aquilegia sp.
MSESAYRVETQSRLAQWRIDSLSSCTYRKSDPFKIGNWNWHLSVEKNRGVYIKLFPVVSNLTRENPPIASFIIRVLCSHGNRHALLHPGVTDKQIKTNDDFIWAIETPLTGKFIIDIEFLDLKAVSQNGGEPCSIWSEGLVQRRSNATALATLGRMLSESIHTDITINASNGSIGAHRAILSSRSPVFQSMFSHNLREKELSTINISDMSIEACQVFLNYVYGSIQHGEFLTHRIALLGAADKYDISDLKEACHESLLEDIDTKNVLERLQTAYLYQLPRLKGSCMRYLIKFGKIYDIRDDFNAFLQSADRDIVAEIFQEVLAAWKGF

SEQ ID NO: 495 - DNA, 987 bp, Solanum lycopersicum
atgacagacagcaaggtagagactctatcaaggttagctcaatggaggatcgacaatttcacagcatctacttacaaaagatctgacccttttaaaattggtatatggaactggcatctgtcaattgagaagaatcggtatttgtatattcgattgtttcctgaaccttctcggctttcgaaagagcagcttcctcctccttttgctcgctttatgcttcgtgttactacaactggaaccaatcggagacctcatatatctcctgtatatgagaggctgcttcgaacaagtgatgactttgtgtggcctattgattcttgtttacaaggtcgatttgtcattgatgttgagttccttgacctgaagatctacaccccaaatggtggagaaggaaaatctatatggcccaatgacatgattttgcaatctttagctacccaaagtactctccgatgcctctctcgcatgcttgatgagtccatccatactgatgttaccattaatacggctgatggatcagtgcaagctcacagagcgatactgtctgctacttctcctgtattccacagcatgttccttcacgatctcagggagaaagagtcctctataatcgacatagaagacatgtcaacagaatcatgcacagcgcttcttagttacttgtatggaaccataaaacaagaggatttctggaagcaccgattggcattactgggtgcggcaaacaagtatgatattgtagatttgaagaatgcttgtgaggaaagtctcctagaagacatcaactcgggtaatgtcctcgaaagactgcaagaggcctggctttaccagctaaataaattgaaaaaaggttgcttgatgtatttgttcgattttggcaagatttatgatgttagggaggaaattaacaacttcttcagacaggcagatagagatctgatgctagagatgtttcaagaagtgctcacagtttggaagcctgcctaa

SEQ ID NO: 496 - protein, 328 aa, Solanum lycopersicum
MTDSKVETLSRLAQWRIDNFTASTYKRSDPFKIGIWNWHLSIEKNRYLYIRLFPEPSRLSKEQLPPPFARFMLRVTTTGTNRRPHISPVYERLLRTSDDFVWPIDSCLQGRFVIDVEFLDLKIYTPNGGEGKSIWPNDMILQSLATQSTLRCLSRMLDESIHTDVTINTADGSVQAHRAILSATSPVFHSMFLHDLREKESSIIDIEDMSTESCTALLSYLYGTIKQEDFWKHRLALLGAANKYDIVDLKNACEESLLEDINSGNVLERLQEAWLYQLNKLKKGCLMYLFDFGKIYDVREEINNFFRQADRDLMLEMFQEVLTVWKPA

SEQ ID NO: 497 - DNA, 987 bp, Gossypium raimondii
atgaccgagtctgcttacagagtcgaaaccaccgctcgtcttgctcaatggaggatagataatcttgccttttgcacttaccgcaaatccgatcctttcaagatcggcaactggaattggcatttgtcaatggagaagaacagggtattgtatgttaaattatacccagaaatttcgaatctaacaagagacaatcccccaattgcatccttcatcatccgagttgtatgctcagcaggggatcgaaaggctttcactcatccagaaataaaagacaaacagctgaagagcaacgaagattttgtctggccgatcgaggttcctttgacggggaaattcataatcgacgttgaatttcttgatctaaaaaccgcatctccaaacggtggggaaccttgctccatttgggctgaaggactcacacaaaagcaatcaaatgccacagctcttgcatgccttggtcggatgttaacacaaagcatccacacagatatcattattaatgcttctaatggaagcattggagctcatcgtgctgttctttctgcacgatcgcctgtttttcacagcatgttttcacataacctgcaagaaaaagaactgtcaaccataaacatatctgacatgtcaattgaagcttgtcaggctttgctatgttacatttatggaaacatcaaacatgaagaattcctggctcaccggctggcacttctccgggcagctgataagtatgatatatcggatttgaaagaggcctgccacgagagtctcctagaagatattgatacaaagaatgtccttgagagactccaaaatgcagctttataccaattgccaaaactcaagtccagttgcatgggatattttgtgagatttggcaagatatatgatattcgagatgattttaatgctttcctgcaatgtgcagacagggagctgataactgatatattccatgaagttttaaatacctggaaaggattttaa

SEQ ID NO: 498 - protein, 328 aa, Gossypium raimondii
MTESAYRVETTARLAQWRIDNLAFCTYRKSDPFKIGNWNWHLSMEKNRVLYVKLYPEISNLTRDNPPIASFIIRVVCSAGDRKAFTHPEIKDKQLKSNEDFVWPIEVPLTGKFIIDVEFLDLKTASPNGGEPCSIWAEGLTQKQSNATALACLGRMLTQSIHTDIIINASNGSIGAHRAVLSARSPVFHSMFSHNLQEKELSTINISDMSIEACQALLCYIYGNIKHEEFLAHRLALLRAADKYDISDLKEACHESLLEDIDTKNVLERLQNAALYQLPKLKSSCMGYFVRFGKIYDIRDDFNAFLQCADRELITDIFHEVLNTWKGF

SEQ ID NO: 499 - DNA, 987 bp, Gossypium hirsutum
atgaccgagtctgcttacagagtcgaaaccaccgctcgtcttgctcaatggaggatagataatcttgccttttgcacttaccgcaaatccgatcctttcaagatcggcaactggaattggcatttgtcaatggagaagaacagggtattgtatgttaaattatacccagaaatttcgaatctaacaagagacaatcccccaattgcatccttcatcatccgagttgtatgctcagcaggggatcgaaaggctttcactcatccagaaataaaagacaaacagctgaagagcaacgaagattttgtctggccgatcgaggttcctttgacggggaaattcataatcgacgttgaatttcttgatctaaaaaccgcatctccaaacggtggggaaccttgctccatttgggctgaaggactcacacaaaagcaatcaaatgccacagctcttgcatgccttggtcggatgttaacacaaagcatccacacagatatcattattaatgcttctaatggaagcattggagctcatcgtgctgttctttctgcacgatcgcctgtttttcacagcatgttttcacataacctgcaagaaaaagaactgtcaaccataaacatatctgacatgtcaattgaagcttgtcaggctttgctatgttacatttatggaaacatcaaacatgaagaattcctggctcaccggctggcacttctccgggcagctgataagtatgatatatcggatttgaaagaggcctgccacgagagtctcctagaagatattgatacaaagaatgtccttgagagactccaaaatgcagctttataccaattgccaaaactcaagtccagttgcatgggatatcttgtgagatttggcaagatatatgatattcgagatgattttaatgctttcctgcaatgtgcagacagggagctgataactgatatattccatgaagttctaaatacctggaaaggattctaa

SEQ ID NO: 500 - protein, 328 aa, Gossypium hirsutum
MTESAYRVETTARLAQWRIDNLAFCTYRKSDPFKIGNWNWHLSMEKNRVLYVKLYPEISNLTRDNPPIASFIIRVVCSAGDRKAFTHPEIKDKQLKSNEDFVWPIEVPLTGKFIIDVEFLDLKTASPNGGEPCSIWAEGLTQKQSNATALACLGRMLTQSIHTDIIINASNGSIGAHRAVLSARSPVFHSMFSHNLQEKELSTINISDMSIEACQALLCYIYGNIKHEEFLAHRLALLRAADKYDISDLKEACHESLLEDIDTKNVLERLQNAALYQLPKLKSSCMGYLVRFGKIYDIRDDFNAFLQCADRELITDIFHEVLNTWKGF

SEQ ID NO: 501 - DNA, 990 bp, Lactuca saligna
atgaccgccgataacgcttaccgtgttgataccacgtcacgcctcgctcaatggcgtatcgacaatttggcttcttgtacttatcgtaaatccgatcctttcgagatcggtaaatggaactggcgattggttattgaaaagaatcgtaatctgtacattaaattgtacccagagatatcgggtttaactaaagaaacccctccaatagcttccttcatcattcgagtggtttcttctttaggaggtcgaaaagctttagttcatccagaaatcagagataaacagcttaaaactagcgacgattttgtttgggcacttgaagttccacttacaggcaaattcatcatcgatcttgagtttcttgaccttaaaaccgcatctccaaacggtggtgaatcgtgctctgtttggacggaaggtttaacacaaaaggatttaaaatcaaccgcgatttcctcccttggaaaaatgttatctgaaagcatccacacagatatcatcatccatgcttcagatggaagcatgggggcccaccgggcagtactggctgcccggtcgcctgtcttccaaagcatgttttctcatgacctaaaagaaaaagaaatgtccgccataaacatctctgacatgtccattgaagcttgccaagcttttttgagttacatttatggtaacattgaagaacaaaactttcttgttcatagactccatcttcttagagcagctgataagtatgatgttgtggatttaaaggaagcatgccatgaaagcttattggaagatattgatacgaataatgttcttgagaggcttcaaattgcttctttatatcgtcttgaaaagctgaagatttgctgcatgcagtatcttgtgaggtttgggaagatatttgacattttagaggaatttgatgcgtttataaaaactgcagacagagaactcatagctgaagtgtttaatgaaattctttctgtctggaaaggtttctga

SEQ ID NO: 502 - protein, 329 aa, Lactuca saligna
MTADNAYRVDTTSRLAQWRIDNLASCTYRKSDPFEIGKWNWRLVIEKNRNLYIKLYPEISGLTKETPPIASFIIRVVSSLGGRKALVHPEIRDKQLKTSDDFVWALEVPLTGKFIIDLEFLDLKTASPNGGESCSVWTEGLTQKDLKSTAISSLGKMLSESIHTDIIIHASDGSMGAHRAVLAARSPVFQSMFSHDLKEKEMSAINISDMSIEACQAFLSYIYGNIEEQNFLVHRLHLLRAADKYDVVDLKEACHESLLEDIDTNNVLERLQIASLYRLEKLKICCMQYLVRFGKIFDILEEFDAFIKTADRELIAEVFNEILSVWKGF

SEQ ID NO: 503 - DNA, 990 bp, Arabidopsis thaliana
atgactgattctgcttacagagtagacaccatttctagactcgcccaatggcgaatccacaatctttcttcctccacttaccgcaagtccgatcctttcaagatgggtctttggaattggcacttgtctgtggagaaaagcaagatgctattaaatgttaagttgtatccagaggtatcaaaccttaccagagaaaatccaccggttgcttcctttgctcttcgtgttgtctcttctactggtgagagaaaggctctatctcatccagaagtaatagataagcggattaagacaaacgaagattttatttggactattgaagttcccttaactgggaaaatcatcatcgacgtcgagtttcttgacttgaaggttttgtctcaagatagtggagaactttactctatctgggccaacggttcaactgagaatcaatcgcaagtaactgcggtaacatcccttggacgtatgttgacagaaagcatttacaccgacataacgatcaatgcctctgatggaagcattggagctcaccgagcagttctcgctgcccgttcacctgttttccgcagcatgtttttacacgacctgaaagagaaagaactatcagaaataaacgtactcgacatgccacttgatgcttgccaagcttttctcagttatatctacggcaatatccaaaacgaagactttcttatacacagattggcactcctccaagcagctgagaaatatgatattgctgatttaaaagaggcgtgccacttgagtcttctagacgatatcgacacaaagaatgtgcttgagaggctacagaatgcttatctctatcaattacctgaactgaaggctagctgcatgagatatcttgtgaagtttggcaaaatatttgagatccgagacgagttcaacatattcatgcaatgcgcagacagagatttgatttctgaaatcttccacgaagtcctcagtacctggaaaggattttag

SEQ ID NO: 504 - protein, 329 aa, Arabidopsis thaliana
MTDSAYRVDTISRLAQWRIHNLSSSTYRKSDPFKMGLWNWHLSVEKSKMLLNVKLYPEVSNLTRENPPVASFALRVVSSTGERKALSHPEVIDKRIKTNEDFIWTIEVPLTGKIIIDVEFLDLKVLSQDSGELYSIWANGSTENQSQVTAVTSLGRMLTESIYTDITINASDGSIGAHRAVLAARSPVFRSMFLHDLKEKELSEINVLDMPLDACQAFLSYIYGNIQNEDFLIHRLALLQAAEKYDIADLKEACHLSLLDDIDTKNVLERLQNAYLYQLPELKASCMRYLVKFGKIFEIRDEFNIFMQCADRDLISEIFHEVLSTWKGF

SEQ ID NO: 505 - DNA, 990 bp, Arabidopsis lyrata
atgactgattctgcttacagagtagacaccatttctagactcgcccaatggcgaatccacaatctttcttcctccacttaccgcaagtccgatcctttcaagatgggtctttggaattggcacttgtctgtagagaaaagcaagatgctattaaatgttaagttgtatccagaggtatccaaccttaccagagaaaacccaccagttgcttcctttgttcttcgtgttgtctcttctgctggtgataggaaagttttatctcatccagaagtaatagataagcggattaagacaaacgaagattttatttggactattgaagttcccttaactgggaaaatcatcatcgacgtcgagtttcttgacttgaaggttctgtctcaagatagtggagaaatttactctatctgggcagacggttcaacagagaatcaatcgaaagggacagcggtcacatcccttggacgtatgttgacagaaagcatttacactgacataatgatcaatgcttctggtggaagcattggagctcaccgagctgttcttgctgcccgctcacctgttttccgcagcatgtttttacacgacctgaaagagaaagaactatcagaaataaacatactcgacatgccacttgatgcttgccaagcttttctcagttatatctacggcaatatccagaacgaagactttcttatacacagattggcactcctccaagctgctgaaaaatatgatattgctgatttaaaagacgcgtgccacttgagccttctagacgacatcgacacaaagaatgtgcttgagaggctacagaatgcttatctctatcaattacctgaactgaaggctagctgcatgaggtatcttgtgaagtttggtaagatatttgaaatctgcgatgagttcaacatattcatgcaatgcgcagacagagatttgatttctgaagtcttccacgaagtcctcagtacctggaaaggattttag

SEQ ID NO: 506 - protein, 329 aa, Arabidopsis lyrata
MTDSAYRVDTISRLAQWRIHNLSSSTYRKSDPFKMGLWNWHLSVEKSKMLLNVKLYPEVSNLTRENPPVASFVLRVVSSAGDRKVLSHPEVIDKRIKTNEDFIWTIEVPLTGKIIIDVEFLDLKVLSQDSGEIYSIWADGSTENQSKGTAVTSLGRMLTESIYTDIMINASGGSIGAHRAVLAARSPVFRSMFLHDLKEKELSEINILDMPLDACQAFLSYIYGNIQNEDFLIHRLALLQAAEKYDIADLKDACHLSLLDDIDTKNVLERLQNAYLYQLPELKASCMRYLVKFGKIFEICDEFNIFMQCADRDLISEVFHEVLSTWKGF

SEQ ID NO: 507 - DNA, 993 bp, Physcomitrella patens
atggcagactgtatttccaaagtggagacaaccacaaggcttgttcaattgcgtgtggacagcctcggaactggctgttatcgtcgatcagatcctttcaaaatcggcctctggaactggcatatactcatcgagaaaaaggcatccctgatcgtgcgtctatacccagaacattgccgcaaggagccatcgcccattgccactttcacggttcggattctggtccgaggtagcgatggtcaacgtgtggaatccaaggttagtgacaagttgcttcggagcagctctgatgacttcatgtggccattagaatactctgtggcatacggtagatttcttgtggaaattgaatttcacgatttgaaagtagcatcctcgcatagtggcgatccacattctatctggacaggcgaagaatacttacaatcgcgagctgaggttggtatagcccggtgcctgtctcgaatgctggaagagggtcttcacaccgacgtgacgatttgctcggccactggttgcgtaggcgctcaccgcgctatccttgcagcacgttcccctgttttcgattccatgttctcccacaacttgatggaaaagcagtccgccacagttcgcataaacgacatgtgcctggagtcttgtcgtgcgctcctcagctttttgtatgggaatttgaaatacccagactttcgaaaacacagggttgccctcgtgcgggcggcgcacaaatatgacatcgtggacctgaaggaggcctgcgagtcgagcttagtagacgacatcgacggtagcaatgtgttagtcaggctgcatgacgcatggctctaccagctcaaggatctgaagcgtgagtgtttgcgctacctgcttgaatttggtaaggtccatgacttgcgcaacgagttcgacgcattcctgcaagacgtcgacaaggatctcgtagttgagcttgtgcaggaacaaatcaaactgctcaaaatacatggcttgtaa

SEQ ID NO: 508 - protein, 330 aa, Physcomitrella patens
MADCISKVETTTRLVQLRVDSLGTGCYRRSDPFKIGLWNWHILIEKKASLIVRLYPEHCRKEPSPIATFTVRILVRGSDGQRVESKVSDKLLRSSSDDFMWPLEYSVAYGRFLVEIEFHDLKVASSHSGDPHSIWTGEEYLQSRAEVGIARCLSRMLEEGLHTDVTICSATGCVGAHRAILAARSPVFDSMFSHNLMEKQSATVRINDMCLESCRALLSFLYGNLKYPDFRKHRVALVRAAHKYDIVDLKEACESSLVDDIDGSNVLVRLHDAWLYQLKDLKRECLRYLLEFGKVHDLRNEFDAFLQDVDKDLVVELVQEQIKLLKIHGL

SEQ ID NO: 509 - DNA, 993 bp, Medicago trunatula
atgaatgattatgcttatgcatacaaagttgaaaccatgaatcgtctagttcaatggaaaattcacaatttatcaacatgcacttatatcaaagctgatccattcaaaatagccatgtggaactggcatttatcagtggaaaagaattgtggtttacgtattgaattatatccagaaatgtctaaaacaatcgcgcacaatcctccaattgcatctttcatagttaggattcttagttatgctggaaatagcaaaatcttgactcaatcagaaataaaagataaacctcttagcaataaggatagctttgtgtgggagataggggttccattacctggaaaattcataattgacattgagtttctggatttgaaaactacatgtccaaagggtggggaagctggctctatttggcctagcggatttatgcagcagagacaaaatgcagcggcccttgaatccctaggtcgaatgataagagaagatatctatacagacataacaatcaacgtcaattccgagggaaacataagagctcatcgagctgttctgtcttcacaatcatctgtgtttcgcagcatgttttcacataatgttaaggagactgatttgtctacgataaacatcaccgacatgtcaattcaatcttttcagacgtttataaattttctttatggaaatgttaatgatgaagagtttcttatgcatagattggacctattacatgcagctgacaagtatgacatctatgagttaagagaggcatgtcaaaagagtcttcaagaagatattgatccaaaaaatgtacttgagagactccaaattgcatctttgtatcaattaacaacattgaagtttagttgtatgcaatatcttgtgaaatttggcaaaatatatgatattcagggtgatttaagttcattcttgcaaactgctgatagagatttgatatgcgaagtcttcaatgaaattcttgatgcttggaaaaagtga

SEQ ID NO: 510 - protein, 330 aa, Medicago trunatula
MNDYAYAYKVETMNRLVQWKIHNLSTCTYIKADPFKIAMWNWHLSVEKNCGLRIELYPEMSKTIAHNPPIASFIVRILSYAGNSKILTQSEIKDKPLSNKDSFVWEIGVPLPGKFIIDIEFLDLKTTCPKGGEAGSIWPSGFMQQRQNAAALESLGRMIREDIYTDITINVNSEGNIRAHRAVLSSQSSVFRSMFSHNVKETDLSTINITDMSIQSFQTFINFLYGNVNDEEFLMHRLDLLHAADKYDIYELREACQKSLQEDIDPKNVLERLQIASLYQLTTLKFSCMQYLVKFGKIYDIQGDLSSFLQTADRDLICEVFNEILDAWKK

SEQ ID NO: 511 - DNA, 993 bp, Oryza sativa
atgagcgacggggcgcgcgtggaggcggcgccgcggctcgcgcaatggcgcgtcgacgtgctcccctgctacacctaccgcaagtccgagcccttccgcatcggcctctggaactggtacctatctgtggagagaaataacaagcaaacttgtgttaaggtctttgcggagttatcgaattctgccaagaatacaaccccagcccctattgcttccttcatcacaaaacttctcatatcttttcctccaaatcagaagaccatagttcatccaggaatttttgacaagccgctgaaacacgaaggttttgtgtgggcaattgatagtactgttacaggaagatttgtgattgagatagagtttcttgacctgaaaattgcagatccatctggtggtgaaccagcctcaatttgggcttcccaccaaatcaagaaatcttcagacaacactgcactgtcatccttggcgagaatgctgcaagaaggcatcctcaccgacatcacaatcaacgctaccgacggcagcattatggcccaccgtgcaatcctggccagccgttcccctgtcttcaggagcatgttctcgcacgacctcaaggagaaagaactctcaacagttgacatctctgacatgtcccttgaagcatgccaggccttcctcaactacatttatggtgacctacgcagcgaagagttcctcacccacaggttagctcttctcagagctgccgataagtatgacatctctgatcttaaggaggcatgccatgagagcctgttagaggacatcgacacgaagaatgtgctcgagaggcttcagatggcgcacttgtaccgattgcaaaagctcaaggatggctgcttgagatttctggtagatttcagaaaggtgtatgaaatgcatgacgatttcaaggtgttcctccagacagcagacagggatatcatagctgaaatcttccaaggtattcttacaacatggagtgggcgataa

SEQ ID NO: 512 - protein, 330 aa, Oryza sativa
MSDGARVEAAPRLAQWRVDVLPCYTYRKSEPFRIGLWNWYLSVERNNKQTCVKVFAELSNSAKNTTPAPIASFITKLLISFPPNQKTIVHPGIFDKPLKHEGFVWAIDSTVTGRFVIEIEFLDLKIADPSGGEPASIWASHQIKKSSDNTALSSLARMLQEGILTDITINATDGSIMAHRAILASRSPVFRSMFSHDLKEKELSTVDISDMSLEACQAFLNYIYGDLRSEEFLTHRLALLRAADKYDISDLKEACHESLLEDIDTKNVLERLQMAHLYRLQKLKDGCLRFLVDFRKVYEMHDDFKVFLQTADRDIIAEIFQGILTTWSGR

SEQ ID NO: 513 - DNA, 993 bp, Panicum virgatum
atgaccgacggcgcgcgcgtggaggcggcgcccaggctcgcgcaatggcgcgtcgacgcgctcccctgctacacctaccgcaagtcgctccccttccgcatcggtctctggaactggtacctatctgtggagagaaacaacaagcaaacttgtgttaagctctttgcagagaattcaaattctacaaagaacggcccctcagccccaatagcttcctttgtcaccaaacttctcatatctcttccacctaatcagcaaaccatagttcacccaggaattttcgacaagcagctgaaacacgacggttttgtgtgggcgattgatagtaccgttacagggagatttgtgattgagatagagtttcttgacctgaaggttactgatccatctggaggtgaaccggcctcaatctgggcctcccaccagatcaagcactcttcagacaacatcgcactgtctgccctgtctcggatgctgcacgaggacatcctcaccgacatcacaatcaacgccgcagacggcagcgtgcgtgcccaccgcgccatcctggcgtcgcgttcccccgtcttccggagcatgttctcgcacgacctcagggagaaggagctctccactgtggacatctccgacatgtccctggaggcatgccatgccttcctccattacatctacggcgacctgcgcagcgaggagttcctcgcgaaccggctggcgctcctccgggcggccgacaagtacgacatggctgacctgaaggaggcctgccacgagagcctgctggaggacatcgacacgggcaacgtgctggagcggctccagaccgcgcacctgtaccggctgccgaggctcaagggtggctgcctgaggttcctggtggacttcaggaaggtgtacgagatgcacgacgacatcaacgtgttcctgcagacggcggagcgggacctcgtggccgaggtgttccatggcgtccttgcagcgtggaacgggcggtaa

SEQ ID NO: 514 - protein, 330 aa, Panicum virgatum
MTDGARVEAAPRLAQWRVDALPCYTYRKSLPFRIGLWNWYLSVERNNKQTCVKLFAENSNSTKNGPSAPIASFVTKLLISLPPNQQTIVHPGIFDKQLKHDGFVWAIDSTVTGRFVIEIEFLDLKVTDPSGGEPASIWASHQIKHSSDNIALSALSRMLHEDILTDITINAADGSVRAHRAILASRSPVFRSMFSHDLREKELSTVDISDMSLEACHAFLHYIYGDLRSEEFLANRLALLRAADKYDMADLKEACHESLLEDIDTGNVLERLQTAHLYRLPRLKGGCLRFLVDFRKVYEMHDDINVFLQTAERDLVAEVFHGVLAAWNGR

SEQ ID NO: 515 - DNA, 993 bp, Sorghum bicolor
atgaccgacggcgcgcgcgtcgaggcggcgcccaggctcgcgcaatggcgcgtcgaggcgctcccctgctacacctatcgcaagtcactccccttccgcatcggcctctggaactggtacctgtctgtggagagaaataacaagcaaacttgtgttaagctctttgcagagaatccaaattctcccaagaacggcccctcagccccaatagcttcctttatcaccaaacttctcatatctcttccacctaatcaacagaccatagtccacccagggattttcgacaaacagctgaaacacgacggttttgtgtgggcaatcgatagcactgtgacagggagatttgtgattgagatagagtttcttgacctgaaggtcgctgatccatctggtggcgaaccagcctcaatctgggcctcccgccagatcaagcagtgttcagacagcaccgctctgtcctccctggctcggatgctgcacgaggacatcctcaccgacatcaccatcaacgcggcggacggcagcgtgcgtgcgcaccgcgccatcctggcgacgcggtcgccggtgttccggagcatgttctcgcacgacctcagggagaaggagctctccaccgtggacatctccgacatgtccctggacgcgtgccgcgccttcctcagctacatctacggcgacgtgagcggcgaggagttcctggcgaaccggctggcgctgctccgtgccgccgacaagtacgacatcgacgacctcagggaggcctgccacgagagcctgctggaggacatcaacatgggcaacgtgctggagcggctgcagacggcgcacctgtaccagctgcccaggctcaagggcggctgccttaggttcctggtggacttcaggaaggtgtacgagatgcacgacgacctcaacgcgttcctgcagacggccgacagggacctcgtggccgaggtgttccatggcgtccttgctgcgtggagcggccggtga

SEQ ID NO: 516 - protein, 330 aa, Sorghum bicolor
MTDGARVEAAPRLAQWRVEALPCYTYRKSLPFRIGLWNWYLSVERNNKQTCVKLFAENPNSPKNGPSAPIASFITKLLISLPPNQQTIVHPGIFDKQLKHDGFVWAIDSTVTGRFVIEIEFLDLKVADPSGGEPASIWASRQIKQCSDSTALSSLARMLHEDILTDITINAADGSVRAHRAILATRSPVFRSMFSHDLREKELSTVDISDMSLDACRAFLSYIYGDVSGEEFLANRLALLRAADKYDIDDLREACHESLLEDINMGNVLERLQTAHLYQLPRLKGGCLRFLVDFRKVYEMHDDLNAFLQTADRDLVAEVFHGVLAAWSGR

SEQ ID NO: 517 - DNA, 993 bp, Medicago trunatula
atgactgattctctttacaaagttgatacaactccacgtcttgctcaatggagaatcgataacttggcttcttgtacttatcgcaaatctgatcctttcaagattggtatctggaattggtatttgtctgtggagaagcacaaggttgtgtttgttaaattgtttcctgaaatatccaatgttacaagagataatcctccaattgcttcttttatcatgcgtgtcgttagttctgctcatggaaatcgaaaagctctcacacatccagagataaaagacaaagtgatcaagagcaatgaagattttgtttggtcaattgaggttccactgtctggaaaattcatcattgatgttgatttccttgatttgaagattgcaggcccagatggtggagaaccttgctccatatggggtggtgaaggatttactcaggagagatcgaacgcaaaagccctaggatctcttggtagaatgctaagagaaggcattcacacagacatcaccattaatgcttctgatggaagtataggagttcatagagctcttctagctgcccgttcacctgtcttccaaagcatgttttcacacgatcttaaagagaaagagttgtcaaccataaacatcacagacatgtcgattgaagtatgtcaggcttttctcaattatctttacgggatcatcaaaaatgaagaatttcttacacataggctagcacttctgcatgcagcggacaagtacgacatatctgacttgagagaggccattcatgagagtcttctagaagatattgatacgaaaaatgtacttgagaggcttcaaaatgcatcactatatcggttgacgaaactgaagatgcattgtatccagtatcttgttaaatttggtaaaatatttgaaattcgggatgatttcaatttgttcctccaaaatgccgacagggatctcatcgctgaagtctttggggaagttcttggtgcctggaaaggatattga

SEQ ID NO: 518 - protein, 330 aa, Medicago trunatula
MTDSLYKVDTTPRLAQWRIDNLASCTYRKSDPFKIGIWNWYLSVEKHKVVFVKLFPEISNVTRDNPPIASFIMRVVSSAHGNRKALTHPEIKDKVIKSNEDFVWSIEVPLSGKFIIDVDFLDLKIAGPDGGEPCSIWGGEGFTQERSNAKALGSLGRMLREGIHTDITINASDGSIGVHRALLAARSPVFQSMFSHDLKEKELSTINITDMSIEVCQAFLNYLYGIIKNEEFLTHRLALLHAADKYDISDLREAIHESLLEDIDTKNVLERLQNASLYRLTKLKMHCIQYLVKFGKIFEIRDDFNLFLQNADRDLIAEVFGEVLGAWKGY

SEQ ID NO: 519 - DNA, 993 bp, Populus trichocarpa
atgacagattcttctgcttatagagttgaaaccacttctcgtcttgctcaatggaagatagacaatcttgcttcttgtacttatcggaaatcagatcctttcaagattggcaagtggaattggcatctatctgtggagaagaaccgggtattatttgttaagttgtatccagagatatcgaatctaacgcgggaaaatcctccaattgcttcatttattattcgagttgtttcttctgctggagatcgcaaggctttgactcatccagaggtaacagataagcagctcaagaacaacgaggatttcgtctgggcaattgatgttcctttaacaacagggaaattcattatcgacgttgaattccttgatttgaaggcagcatctccagggggtggagaaccttgctcgatctgggacgaagaaaccacagaaaagcgagcaaatgcaacagctcttgtgtcacttggtagaatgttaacagaaagcatccacacggatatcaaaattattgtttctgatggaagcattggagcccaccgtgctgttcttgctgcaagatcgcctgttttccacagcatgtttgctcatgacctgaaagaaaaggaactgtcaaccataaatatctccgacatgtcaattgaagcttgtcaggcttttctcaattacatatatgggaacatccagagtgaagaatttcttgtccaccgtttggcacttctcagtgcagctgataagtatgatattgctgacctgaaagaggcatgtcatgacagtcttctggaagatatagacacaaagaatgtacttgagaggctacaaagcgcatccttgtatcaattgccgaaactgaagaccagctgcctgcggtatcttgtgaagttcggtaagatatttgatattcgagatgatttcaattccttcttgcaatgtgcagacagggatctgatagctgaagtctttcatgaagttctcaattcctggaaaggattctga

SEQ ID NO: 520 - protein, 330 aa, Populus trichocarpa
MTDSSAYRVETTSRLAQWKIDNLASCTYRKSDPFKIGKWNWHLSVEKNRVLFVKLYPEISNLTRENPPIASFIIRVVSSAGDRKALTHPEVTDKQLKNNEDFVWAIDVPLTTGKFIIDVEFLDLKAASPGGGEPCSIWDEETTEKRANATALVSLGRMLTESIHTDIKIIVSDGSIGAHRAVLAARSPVFHSMFAHDLKEKELSTINISDMSIEACQAFLNYIYGNIQSEEFLVHRLALLSAADKYDIADLKEACHDSLLEDIDTKNVLERLQSASLYQLPKLKTSCLRYLVKFGKIFDIRDDFNSFLQCADRDLIAEVFHEVLNSWKGF

SEQ ID NO: 521 - DNA, 993 bp, Oryza sativa
atgagcgacggggcgcgcgtggaggcggcgccgcggctcgcgcaatggcgcgtcgacgtgctcccctgctacacctaccgcaagtccgagcccttccgcatcggcctctggaactggtacctatctgtggagagaaataacaagcaaacttgtgttaaggtctttgcggagttatcgaattctgccaagaatacaaccccagcccctattgcttccttcatcacaaaacttctcatatcttttcctccaaatcagaggaccatagttcatccaggaatttttgacaagccgctgaaacacgaaggttttgtgtgggcaattgatagtactgttacaggaagatttgtgattgagatagagtttcttgacctgaaaattgcagatccatctggtggtgaaccagcctcaatttgggcttcccaccaaatcaagaaatcttcagacaacactgcactgtcatccttggcgagaatgctgcaagaaggcatcctcaccgacatcacaatcaacgctaccgacggcagcattatggcccaccgtgcaatcctggccagccgttcccctgtcttcaggagcatgttctcgcacgacctcaaggagaaagaactctcaacagttgacatctctgacatgtcccttgaagcatgccaggccttcctcaactacatttatggtgacctacgcagcgaagagttcctcacccacaggttagctcttctcagagctgccgataagtatgacatctctgatcttaaggaggcatgccatgagagcctgttagaggacatcgacacgaagaatgtgctcgagaggcttcagatggcgcacttgtaccgattgcaaaagctcaaggatggctgcttgagatttctggtagatttcaggaaggtgtatgaaatgcatgacgatttcaaggtgttcctccagacagcagacagggatatcatagctgaaatcttccaaggtattcttacaacatggagtgggcgataa

SEQ ID NO: 522 - protein, 330 aa, Oryza sativa
MSDGARVEAAPRLAQWRVDVLPCYTYRKSEPFRIGLWNWYLSVERNNKQTCVKVFAELSNSAKNTTPAPIASFITKLLISFPPNQRTIVHPGIFDKPLKHEGFVWAIDSTVTGRFVIEIEFLDLKIADPSGGEPASIWASHQIKKSSDNTALSSLARMLQEGILTDITINATDGSIMAHRAILASRSPVFRSMFSHDLKEKELSTVDISDMSLEACQAFLNYIYGDLRSEEFLTHRLALLRAADKYDISDLKEACHESLLEDIDTKNVLERLQMAHLYRLQKLKDGCLRFLVDFRKVYEMHDDFKVFLQTADRDIIAEIFQGILTTWSGR

SEQ ID NO: 523 - DNA, 996 bp, Triticum aestivum
atgagcgccgcggggtcccgggtcgaggcggcgccgcggctcgcgcaatggcgcgtcgacgccctcccctgctacacctaccgcaagtccgactccttccgcgtcggcctctggaactggtacctgtctgtggagagaaacaacaagcaaacttgcgttaagctctttgcagagttgtcaaattctgccaagaacacagcccccgcaccgatagcctcgtttgtcacgaaacttctgatatcctttcctccagatcagaagatcatagagcatccaggtatcctggacaagcctctgaaacacgaagggcttgtgtggacgattgatagtagttttacaggaagatttgtgattgagatagagtttctggacctcaaagttgcagattcatctggaggtgaacctgcctcgatctgggcctcacgccaaatcaagcagtcttcagacaacaccgcgctgtcatcccttgcaaaaaaaaagcaagaaggcatcctctgcgacatcaccatcaacgccgacgatggcagcatcaaggcccaccgcgccatcctggccgcccgctcgcccgtcttcaggagcatgttcacgcacgacctcagggagaaggagctctccacggtggacatctccgacatgtccctcgacgcgtgccggggcttcctcaactacatctacggcaacctgcgcagcgaggagttcctcgcgcaccggctggccctcctcggcgccgccgacaagtacgacatcgccgacctcaaggaggcgtgcctcgagagcctgctggaggacatcgacgcccggaacgtgatcgaacggctacagacgggccacctgtaccggctgcagaggctcaaggacagctgcatcaggttcctcgtcgacttcaggaaggtgtacgagatgcaggaggagttcagcgccttccttcagacggcggacagggacctggtggctgaagtgtttcagggcgttcttgcggcgtggagcggccggtga

SEQ ID NO: 524 - protein, 331 aa, Triticum aestivum
MSAAGSRVEAAPRLAQWRVDALPCYTYRKSDSFRVGLWNWYLSVERNNKQTCVKLFAELSNSAKNTAPAPIASFVTKLLISFPPDQKIIEHPGILDKPLKHEGLVWTIDSSFTGRFVIEIEFLDLKVADSSGGEPASIWASRQIKQSSDNTALSSLAKKKQEGILCDITINADDGSIKAHRAILAARSPVFRSMFTHDLREKELSTVDISDMSLDACRGFLNYIYGNLRSEEFLAHRLALLGAADKYDIADLKEACLESLLEDIDARNVIERLQTGHLYRLQRLKDSCIRFLVDFRKVYEMQEEFSAFLQTADRDLVAEVFQGVLAAWSGR

SEQ ID NO: 525 - DNA, 996 bp, Triticum aestivum
atgagcgccgcggggtcccgggtcgagccctcgccgcggctcgcgcaatggcgcgtcgacgccctcccctgctacacctaccgcaagtccgactccttccgcgtcggcctctggaactggtacctgtctgtggagagaaacaacaagcaaacttgcgttaagctctttgcagagttgtcaaattctgccaagaacacagcccccgcaccgatagcctcgtttgtcacgaaacttctgatatcctttcctccagatcagaagatcatagagcatccaggtatcctggacaagcctctgaaacacgaagggtttgtgtggacgattgatagtagttttacaggaagatttgtgattgagatagagtttctggacctcaaagttgcagattcatctggaggtgaacctgcctcgatctgggcctcacgccaaatcaagcagtcttcagacaacaccgcgctgtcatcccttgcaaggatgctgcaagaaggcatcctctgcgacatcacgatcaacgccgacgatggcagcatcagggcgcaccgggcgatcctggccgcccgctcgcccgtctttcggagcatgttctcgcacgacctcagggagaaggagctctccacggtggacatctccgacatgtccctcgacgcgtgccggggcttcctcaactacatctacggcaacctgcgcagcgaggagttcctcgcgcaccggctggccctcctcggcgccgccgacaagtacgacatcgccgacctcaaggaggcgtgcgtcgagagcctgctggaggacatcgacgcccggaacgtgatcgaacggctacagacgggccacctgtaccggctgcagaggctcaaggacagctgcctcaggttcctggtcgacttcaggaaggtgtacgagatgcaggaggagttcagcgcgttccttcagacggcggacagggacctggtggctgaggtgtttcagggcgttcttgcggcgtggagcggccggtga

SEQ ID NO: 526 - protein, 331 aa, Triticum aestivum
MSAAGSRVEPSPRLAQWRVDALPCYTYRKSDSFRVGLWNWYLSVERNNKQTCVKLFAELSNSAKNTAPAPIASFVTKLLISFPPDQKIIEHPGILDKPLKHEGFVWTIDSSFTGRFVIEIEFLDLKVADSSGGEPASIWASRQIKQSSDNTALSSLARMLQEGILCDITINADDGSIRAHRAILAARSPVFRSMFSHDLREKELSTVDISDMSLDACRGFLNYIYGNLRSEEFLAHRLALLGAADKYDIADLKEACVESLLEDIDARNVIERLQTGHLYRLQRLKDSCLRFLVDFRKVYEMQEEFSAFLQTADRDLVAEVFQGVLAAWSGR

SEQ ID NO: 527 - DNA, 996 bp, Triticum aestivum
atgagcgccgcggggtcccgggtcgaggcggcgccgcggctcgcgcaatggcgcgtcgacgcgctcccctgctacacctaccgcaagtccgactccttccgcgtcggcctctggaactggtacctgtctgtggagagaaacaacaagcaaacttgcgttaagctctttgcagagttgtcaaattccgccaagaacacagccccggcaccgatagcctcctttgtcacaaaacttctgatatcctttcctccaaatcagaagatcatagagcatccaggtatcttggacaagcatctgaagcacgaagggtttgtgtggacgattgatagtagttttacaggaagatttgtgattgagatagagtttctggacctgaaagttgcagactcatctggtggtgaacctgcctcgatctgggcctcacaccaaatcaagcagtcctcagacaacaccgcgctgtcatccctcgcaaggatgctgcaagagggcatcctctgcgacatcacgatcaacgccgacgacggcagcatcagggcgcaccgggcgatcctggccgcccgctcgcccgtcttcaggagcatgttctcgcacgacctcagggagaaggagctctccacggtcgacatctccgacatgtccctcgacgcgtgccggggcttcctcaactacatctacggcgacctgcacagcgaggagttcctcgcgcaccggctggccctcctcggcgccgccgacaagtacgacatcgccgacctcaaggaggcgtgcctcgagagcctgctggaggacatcgacgcccggaacgtgatcgaacggctccagacgggccatctgtaccggctgcagaggctcaaggacagctgcatcaggttcctcgtggacttcaggaaggtgtacgagatgcaggaggagttcagcgccttccttcagacggcggacagggacctggtggctgaagtgtttcagggcgttcttgcggcgtggagtggccggtga

SEQ ID NO: 528 - protein, 331 aa, Triticum aestivum
MSAAGSRVEAAPRLAQWRVDALPCYTYRKSDSFRVGLWNWYLSVERNNKQTCVKLFAELSNSAKNTAPAPIASFVTKLLISFPPNQKIIEHPGILDKHLKHEGFVWTIDSSFTGRFVIEIEFLDLKVADSSGGEPASIWASHQIKQSSDNTALSSLARMLQEGILCDITINADDGSIRAHRAILAARSPVFRSMFSHDLREKELSTVDISDMSLDACRGFLNYIYGDLHSEEFLAHRLALLGAADKYDIADLKEACLESLLEDIDARNVIERLQTGHLYRLQRLKDSCIRFLVDFRKVYEMQEEFSAFLQTADRDLVAEVFQGVLAAWSGR

SEQ ID NO: 529 - DNA, 999 bp, Zea mays
atgaccgacggcgcgcgcgtcgagacggcgcccaggctcgcccaatggcgcgtcgacccgctcccctgctacacctaccgcaagtcactccccttcctcatcggcctctggaactggtgcatatctgtggagagaaataacaagcaaacctgtgttaagctctttgcagagaatacaagttctctcaagaacggttcctcagccccaatagcttcctttatcgccaaacttattgtatctcttccacctaatcagcagaccatagtccacccaggaatttttgacaaacagctgaaatacgacggttttgtgtggacaatcgatagcaccgtcactgggaggtttgtgattgagatagagtttcttgacctgaaggtcgctgatccgtctggcggggagccggcctcgatttgggcctcccgccaggtcaagcagtgctcggacagcacggccctgtcgtccctggctcggatgctgcacgaggacgtcctcaccgacatcaccatcaacgcggcggacggcagcgtgggcgcgcaccgcgcggtcctggcgacgcggtcgccggtgttccggagcatgttctcgcacgacctgagggagaaggagctctccaccgtggacatcaccgacatgtccctggacgcgtgccgcgccttcctcagctacatctacggcgacgtgcgcggcggcgaggagttcctggcgaaccggctggcgctcctccgcgccgccgacaagtacgacatcggcgacctcagggaggcctgccacgagagcctgctggaagacatcgacgcgcgcaacgtgctggagcggctgcagacggcgcacctgtaccggctgccgaggctcaagggcggctgcctgaggttccttgtggacttcaggaaggtgtacgagatgcacgacgacgacctcaacgcgttcctgcagacggccgacagggaactcgtggccgaggtgttccatggcgttcttgccgcgtggagcgggcggtaa

SEQ ID NO: 530 - protein, 332 aa, Zea mays
MTDGARVETAPRLAQWRVDPLPCYTYRKSLPFLIGLWNWCISVERNNKQTCVKLFAENTSSLKNGSSAPIASFIAKLIVSLPPNQQTIVHPGIFDKQLKYDGFVWTIDSTVTGRFVIEIEFLDLKVADPSGGEPASIWASRQVKQCSDSTALSSLARMLHEDVLTDITINAADGSVGAHRAVLATRSPVFRSMFSHDLREKELSTVDITDMSLDACRAFLSYIYGDVRGGEEFLANRLALLRAADKYDIGDLREACHESLLEDIDARNVLERLQTAHLYRLPRLKGGCLRFLVDFRKVYEMHDDDLNAFLQTADRELVAEVFHGVLAAWSGR

SEQ ID NO: 531 - DNA, 1005 bp, Panicum virgatum
atgagcctcagcagcggcgccgcgccggactcccgcgtggagaccatctcccggctggcgcagtggcgcatcgacaccctgggcccctgctgcttccgccgctccgaccccttcaagctcggcatctggaactggtacctgtcggtcgagaagacccgctccctgtgcatccgcctcttcccggagcccggccgggtggccaaggagcagccccctctcgcgcgcttcctgctccgcgtctcctggcccggcccgccgcgccgctcctgcgcatcccctgtgcaagagcagcttctccgaaccagtgatgactttgtatggcaagttgatgccatgtcccatgggcgtttcacaatcgatgttgagtttctagacctgaggatagccactaacaatgctaccgaatcatcttcatcgatctggccgaatgaaggaatggtgcagagaattgctggtaacagcactctgggatgcctttcccgcatgctgacagagtcaatccacacggacgtgaccatcaacacgactgatggcgtcctcaaggcccacaaggctgtgctggcagcttgctctcccgtgtttgagagcatgttcgtgcacgacctcaaggagaaggagtcgtccacggtgaacatcaacgacatgtgcctggagtcgtgctcggcgcttctaggcttcatctacgggacgatcaagcaggaacagttctggaagcaccggctgtcgctgctggcagcggcgaacaagtacggcatcggcgacatcaaggactgctgcgaggagagcctgctggaggacatcaactcgagcaacgtcctggagcggctccacgtggcgtggctgtaccagctggggaggctgaagaaagggtgcctcagctacctgtttgtgtttgggaagatttacgacgtgagggatgagatccatagcttcttccaccacgccgaccgcgagctgatggtggagatgttccaggaggtgctcagtgtctggaagcccatatga

SEQ ID NO: 532 - protein, 334 aa, Panicum virgatum
MSLSSGAAPDSRVETISRLAQWRIDTLGPCCFRRSDPFKLGIWNWYLSVEKTRSLCIRLFPEPGRVAKEQPPLARFLLRVSWPGPPRRSCASPVQEQLLRTSDDFVWQVDAMSHGRFTIDVEFLDLRIATNNATESSSSIWPNEGMVQRIAGNSTLGCLSRMLTESIHTDVTINTTDGVLKAHKAVLAACSPVFESMFVHDLKEKESSTVNINDMCLESCSALLGFIYGTIKQEQFWKHRLSLLAAANKYGIGDIKDCCEESLLEDINSSNVLERLHVAWLYQLGRLKKGCLSYLFVFGKIYDVRDEIHSFFHHADRELMVEMFQEVLSVWKPI

SEQ ID NO: 533 - DNA, 1011 bp, Sorghum bicolor
atgaacggcggcgggtccggaggggcgagcgggccggactcccgcgtggagaccatctcccgcctggcgcagtggcgcatcgacaccttcggcccctgctcctaccgccgctccgaccccttcaagctcggcatctggaactggtacctgtcggtggagaagagccgctccatcttcgtgcgcctcttcccggagcccggccgggtggccaaggagcagccccctctcgcgcgcttcctgctccgcgtctcctgggccggcccgccgcgacgcacctgcgtctcccctgtgcacgaacatcttctgcgtaccagtgatgactttgtctggcaagttgatgcaatgtcccatgggcgttttacgattgatgttgagtttctggacctgaggatagccaataacaatgctactgaatcattgtcggtatggccaaccgaaggcatggtgcagaagattgcgagcaagagcaccctcgggtgtctctcccgcatgctgacggattccatccacacagacgtgaccatcaacacgacggacggcgtcctgaaggcccacaaggcggtgctggcggcgtgctcccccgtgttcgaaagcatgttcatgcacgacctgagggagaaggagtcgtccacaatcaacatcagcgacatgtgcctggagtcgtgctcggcgctgctgggcttcatctatgggacgatcgagcaggggcagttctggaagcaccggctgccactgctggcggcggccaacaagtacgggattggcgacatcaaggactgctgcgaggagagcctgctggaggatattacctcggcgaacgtccttgagcggctccacgtggcgtggctgtaccagctggagcggctcaagaaagggtgcctcacctacctgtttgtgtttgggaagatttatgatgtgagggacgagatgcacagcttcttccaccacgcggaccgcgagctcatgctcgagatgttccaggaggtcctcagcgtgtggaagcccatgtga

SEQ ID NO: 534 - protein, 336 aa, Sorghum bicolor
MNGGGSGGASGPDSRVETISRLAQWRIDTFGPCSYRRSDPFKLGIWNWYLSVEKSRSIFVRLFPEPGRVAKEQPPLARFLLRVSWAGPPRRTCVSPVHEHLLRTSDDFVWQVDAMSHGRFTIDVEFLDLRIANNNATESLSVWPTEGMVQKIASKSTLGCLSRMLTDSIHTDVTINTTDGVLKAHKAVLAACSPVFESMFMHDLREKESSTINISDMCLESCSALLGFIYGTIEQGQFWKHRLPLLAAANKYGIGDIKDCCEESLLEDITSANVLERLHVAWLYQLERLKKGCLTYLFVFGKIYDVRDEMHSFFHHADRELMLEMFQEVLSVWKPM

SEQ ID NO: 535 - DNA, 1011 bp, Zea mays
atgagcggcggcgggcccggaggtgcgtgcgggccggactcccgcgtggagaccatctcccggctggcgcagtggcgcatcgataccttcggcccctgctcctaccgccggtcggacccctttaagctcggcatctggaactggtacctgtcggtggagaagagccgctccatcgttgtgcgcctcttcccggagcccggccgggtggccaaggagcagccccctctcgcgcgcttcctgctccgcgtctcctgggccggcccgccgcgacgctcctgcgtctcccctgtgcacgagcatcttctgcgtaccagcgatgattttgtatggcaagtcgatgcgatgtcccatgggcgttttacgattgatgttgagtttctagacctgaggatagccacgaacaatgctacggaatcgtcatcggtgtggccaaacgaaggcatggtgcagaagatcgcgagcaagagcgccctgggctgcctgtcgcgcatgctggcggactccatccacgcggacgtgaccatcaacacgacggacggggtgctgaaggcgcacaaggcggtgctggcggcgtgctcccccgtgttcaagagcatgttcgtgcacgacctgagggagaaggagtcgtcgacggtggacatcggcgacatgtgcgtggagtcgtgctcggcgctgctgggcttcgtgtacgggacgatcgagcagggacagttctggaagcaccggctgccgctgctggcggcggcggacaagtacgggatcggcgacatcaaggactgctgcgaggagagcctgctggaggacataggctcgggcaacgtgctggagcggctccacgtggcgtggctgtaccggctggagcggctgaagaaagggtgcctcacctacctgttcgtgttcgggaagatctatgacgtgagggacgagatgcacggcttcttccaccacgcggaccgcgagctcatgcacgacatgttccaggaggtgctcagcgtgtggaagcccatgtga

SEQ ID NO: 536 - protein, 336 aa, Zea mays
MSGGGPGGACGPDSRVETISRLAQWRIDTFGPCSYRRSDPFKLGIWNWYLSVEKSRSIVVRLFPEPGRVAKEQPPLARFLLRVSWAGPPRRSCVSPVHEHLLRTSDDFVWQVDAMSHGRFTIDVEFLDLRIATNNATESSSVWPNEGMVQKIASKSALGCLSRMLADSIHADVTINTTDGVLKAHKAVLAACSPVFKSMFVHDLREKESSTVDIGDMCVESCSALLGFVYGTIEQGQFWKHRLPLLAAADKYGIGDIKDCCEESLLEDIGSGNVLERLHVAWLYRLERLKKGCLTYLFVFGKIYDVRDEMHGFFHHADRELMHDMFQEVLSVWKPM

SEQ ID NO: 537 - DNA, 1011 bp, Aquilegia sp.
atgaccagcagcagcagcagtagtagtggtgttggagattcgaaagtggagacaatatcaagactagcacaatggagaatagacagttttggtccttgttcttatcgtcgttctgatcctttcaaggtcggcatttggaactggcacttatcagtggagaagaatcggtatttatatgttcgtttgtttccagaaccatctaaactatgcaaagatcaaccccccatagctagatttgtgctcagagtctccaatattggcaccaatcgacgcccttatatttctcccattcatgagagattgctaagaaccagtgaagactttaattggcctgttgattgcgcatttcatggtcgttttatcattgatgttgagtttttggatctcaaaatctgcccagtaaatggcgtggaagccagctcgatctggcctagtgaaggatttgtgaacactctgtcatcccaaggttctcttagatgcctatctcggatgcttgatgagggtattcatgctgatgtcaccattaacgcagctgatggcacactgcgagcgcacaaggcaatactatctgctagttcttctgtgtttcacagtatgttcttacacgacctgaaggagaaagaatcatccacaattgatatagatgacatgtcaatggagtcgtgcactgcccttctcagttatatatatgggaccattaaacaaatagatttttggaagcatcggttggcacttcttggtgcagcaaacaagtatgacatcacacttttgaaagacgcctgtgaggaaagcctcctagaggatatcaactctggcaatgtccttgagaggctgcaggaggcatggttgtaccagttggaagggcttaagaaagggtgcttgatgtacttgtttgactttggcaagatctatgatgtcagagatgaaatcaataacttcttcaggaatgctgatagagaattaatggtggaaatgtttcaggaagtgctcacagtctggaagcccgcataa

SEQ ID NO: 538 - protein, 336 aa, Aquilegia sp.
MTSSSSSSSGVGDSKVETISRLAQWRIDSFGPCSYRRSDPFKVGIWNWHLSVEKNRYLYVRLFPEPSKLCKDQPPIARFVLRVSNIGTNRRPYISPIHERLLRTSEDFNWPVDCAFHGRFIIDVEFLDLKICPVNGVEASSIWPSEGFVNTLSSQGSLRCLSRMLDEGIHADVTINAADGTLRAHKAILSASSSVFHSMFLHDLKEKESSTIDIDDMSMESCTALLSYIYGTIKQIDFWKHRLALLGAANKYDITLLKDACEESLLEDINSGNVLERLQEAWLYQLEGLKKGCLMYLFDFGKIYDVRDEINNFFRNADRELMVEMFQEVLTVWKPA

SEQ ID NO: 539 - DNA, 1014 bp, Lactuca sativa
atgaggaatatgcagagagctcttgattcggggatggttgataccaaggtagagaccatatccaggttggctcaatggaggatcgacaattttggaccttgtacttacaaaagatcagaacctttcaaaatcggcatatggaattggcaaatatcagtcgagaagaatcgacatctttacgttcgtctgtttccagagccgtctcgcctatcgaaagaacagccgccgattgccaaattcataattcgagttaccaccgcgggatccaatcgcagaccatacatctcaccaattcatgagagacttcttcggacaagtgaagactttgtgtggcctgttgattctactttccatggtcgattcatcatagatgtcgagttcttggaccttcaggtttattcggctaatggagaggaagcaagttcgatatggcctcgggacacgacgctgcggtcatcagcaacggacagcattctgcgttgcctttcccggatgctccgggagtccatcgatgctgacgtgaccatcaacacgtgtgatgggagtttaaaagcccacaaagccatactttctgccagctcacccgtcttccacagcatgttcctccacaacctccaggaaaaagaatcctccaccattaacatccaggacatgtccttggagtcttgcactgcgcttctgtcttacttgtatggaagcatcaagcaggaggagttctggcgccaccgggtcccactcctgagtgcggccaataagtatgggattgggaatttgaaggatttgtgtgaggagagtttgctggaggatataaactcagggaatgtgctcgagaggttgcaggaggcctggctttaccagcttgacaaactcaagaaagggtgtttgacgtatttgtttgattttgggaagatttatgatatcaaagatgagattaatatcttttttaggactgctgagagggaactcatacaggaaatgtttcaggaggtgcttacggtttggaaacccgcctga

SEQ ID NO: 540 - protein, 337 aa, Lactuca sativa
MRNMQRALDSGMVDTKVETISRLAQWRIDNFGPCTYKRSEPFKIGIWNWQISVEKNRHLYVRLFPEPSRLSKEQPPIAKFIIRVTTAGSNRRPYISPIHERLLRTSEDFVWPVDSTFHGRFIIDVEFLDLQVYSANGEEASSIWPRDTTLRSSATDSILRCLSRMLRESIDADVTINTCDGSLKAHKAILSASSPVFHSMFLHNLQEKESSTINIQDMSLESCTALLSYLYGSIKQEEFWRHRVPLLSAANKYGIGNLKDLCEESLLEDINSGNVLERLQEAWLYQLDKLKKGCLTYLFDFGKIYDIKDEINIFFRTAERELIQEMFQEVLTVWKPA

SEQ ID NO: 541 - DNA, 1149 bp, Oryza sativa
atgttaccgggagttattacaagtagagtgagaggagacggcgcggcggcggcggcggcggcgggatggagagggagaaccgggtggagaccatctcccggctggcccagtggcgcatcgacaccttcggcccctcctcctaccgccgctccgattccttcaagatcggcatctggaactggttcccttcccaatcccaatcccccactactcagagatcaccgatttgccctatcaaatcaaatcatccgccaattcgatccgaatccgtgcaggtacctatcggtggagaaggctcgatatgtatacgtgaggctgttcccggagcccgggcgggtggccaaggaacggcccccgctcgcccgcttccttctccgagcttgctggtccggcccgccacgccgctcctgcgtctcccctgtgcatgagcatctcctccgaagcagcgaagactttttctggcaacttgatacgatgtacgctgggcgtttcactattgatgttgagtttttggacctgaagatagcctctaacaatgctgcagaatcatctacctcgatttggccaaatgaaagcatagcggtgcagaacattgctagtaagagcagtctcggatgcctttcgcgcatgctcacggagtcgatacatgcagacgtcaccataaatacgactgatggtgtcctcaaggcccataaggccatccttgcatcatgttctcctgtgtttgaaagcatgttcctccatgatctcaaggaaaaggagtcctccacaatcaacataaatgacatgtgccttgagtcttgctctgctctgattggcttcatctacgggaccataaagctagaccagttctggaagcaccgcctctcgctgctcgccgcagcgaacaagtacagcatttctgatatcaaggactgctgcgaggagagcctcctggaggatataaactctagcaatgtcctcgagaggcttcacgtcgcgtggctgtaccagctgcaaaagctgaagaaagggtgcctgacctacctgtttgtttttgggaagatatacgatgtgagggaggagatcaatagcttcttccagcacgcagatcgtgagctgatgctggaaatgttccaagaggtcataactgcgtggaagcccatatga

SEQ ID NO: 542 - protein, 382 aa, Oryza sativa
MLPGVITSRVRGDGAAAAAAAGWRGRTGWRPSPGWPSGASTPSAPPPTAAPIPSRSASGTGSLPNPNPPLLRDHRFALSNQIIRQFDPNPCRYLSVEKARYVYVRLFPEPGRVAKERPPLARFLLRACWSGPPRRSCVSPVHEHLLRSSEDFFWQLDTMYAGRFTIDVEFLDLKIASNNAAESSTSIWPNESIAVQNIASKSSLGCLSRMLTESIHADVTINTTDGVLKAHKAILASCSPVFESMFLHDLKEKESSTININDMCLESCSALIGFIYGTIKLDQFWKHRLSLLAAANKYSISDIKDCCEESLLEDINSSNVLERLHVAWLYQLQKLKKGCLTYLFVFGKIYDVREEINSFFQHADRELMLEMFQEVITAWKPI

SEQ ID NO: 543 - protein, 50 aa, Artificial sequence
  motif 7
  VARIANT (3)..(3): / replace = "Lys"
  VARIANT (5)..(5): / replace = "Ile"
  VARIANT (7)..(7): / replace = "Ser"
  VARIANT (9)..(9): / replace = "Thr" / replace = "Ser"
  VARIANT (14)..(14): / replace = "Glu" / replace = "His"
  VARIANT (18)..(18): / replace = "Leu"
  VARIANT (20)..(20): / replace = "Asn"
  VARIANT (22)..(22): / replace = "Arg"
  VARIANT (26)..(26): / replace = "Leu"
  VARIANT (28)..(28): / replace = "Thr"
  VARIANT (29)..(29): / replace = "Val"
  VARIANT (30)..(30): / replace = "Asp" / replace = "His"
  VARIANT (32)..(32): / replace = "Glu"
  VARIANT (36)..(36): / replace = "Leu"
  VARIANT (38)..(38): / replace = "Ala"
  VARIANT (40)..(40): / replace = "Thr" / replace = "Met"
  VARIANT (42)..(42): / replace = "Phe"
  VARIANT (44)..(44): / replace = "Asn"
  VARIANT (46)..(46): / replace = "Ile"
  VARIANT (49)..(49): / replace = "Thr"
AHRAVLAARSPVFRSMFSHDLKEKESSIINISDMSTESCQALLSYLYGNI

SEQ ID NO: 544 - protein, 50 aa, Artificial sequence
  motif 8
  VARIANT (1)..(1): / replace = "Glu"
  VARIANT (2)..(2): / replace = "Phe"
  VARIANT (3)..(3): / replace = "Leu"
  VARIANT (11)..(11): / replace = "Arg"
  VARIANT (14)..(14): / replace = "Asn"
  VARIANT (19)..(19): / replace = "Gly"
  VARIANT (23)..(23): / replace = "Asn" / replace = "Asp"
  VARIANT (26)..(26): / replace = "His"
  VARIANT (34)..(34): / replace = "Asn"
  VARIANT (35)..(35): / replace = "Thr"
  VARIANT (36)..(36): / replace = "Gly"
DLWKHRLALLGAADKYDIVDLKEACEESLLEDIDSKNVLERLQEAWLYQL

SEQ ID NO: 545 - protein, 41 aa, Artificial sequence
  motif 9
  VARIANT (1)..(1): / replace = "Arg"
  VARIANT (5)..(5): / replace = "Leu" / replace = "Thr"
  VARIANT (14)..(14): / replace = "Glu"
  VARIANT (16)..(16): / replace = "Phe"
  VARIANT (17)..(17): / replace = "Thr"
  VARIANT (18)..(18): / replace = "Ala" / replace = "Ser"
  VARIANT (19)..(19): / replace = "Cys"
  VARIANT (20)..(20): / replace = "Ser"
  VARIANT (22)..(22): / replace = "Lys"
  VARIANT (23)..(23): / replace = "Arg"
  VARIANT (29)..(29): / replace = "Val"
  VARIANT (31)..(31): / replace = "Leu"
  VARIANT (35)..(35): / replace = "Tyr"
  VARIANT (38)..(38): / replace = "Ile"
  VARIANT (40)..(40): / replace = "Arg"
KVETISRLAQWRIDNLGPSTYRKSDPFKIGIWNWHLSVEKN

SEQ ID NO: 546 - protein, 50 aa, Artificial sequence
  motif 10
  VARIANT (3)..(3): / replace = "Lys"
  VARIANT (5)..(5): / replace = "Ile"
  VARIANT (7)..(7): / replace = "Ser"
  VARIANT (9)..(9): / replace = "Thr" / replace = "Ser"
  VARIANT (14)..(14): / replace = "His"
  VARIANT (18)..(18): / replace = "Leu"
  VARIANT (20)..(20): / replace = "Asn"
  VARIANT (22)..(22): / replace = "Arg"
  VARIANT (26)..(26): / replace = "Ser"
  VARIANT (29)..(29): / replace = "Val"
  VARIANT (30)..(30): / replace = "Asp"
  VARIANT (32)..(32): / replace = "Glu"
  VARIANT (36)..(36): / replace = "Thr" / replace = "Ile"
  VARIANT (37)..(37): / replace = "Asp"
  VARIANT (38)..(38): / replace = "Ser"
  VARIANT (40)..(40): / replace = "Thr"
  VARIANT (42)..(42): / replace = "Phe"
  VARIANT (44)..(44): / replace = "Asn"
  VARIANT (46)..(46): / replace = "Leu"
  VARIANT (49)..(49): / replace = "Thr"
AHRAVLAARSPVFRSMFSHDLKEKELSTINISDMSLEACQALLSYIYGNI

SEQ ID NO: 547 - protein, 50 aa, Artificial sequence
  motif 11
  VARIANT (1)..(1): / replace = "Glu"
  VARIANT (2)..(2): / replace = "Phe"
  VARIANT (3)..(3): / replace = "Trp"
  VARIANT (11)..(11): / replace = "Arg"
  VARIANT (14)..(14): / replace = "Asn"
  VARIANT (19)..(19): / replace = "Gly"
  VARIANT (23)..(23): / replace = "Asn" / replace = "Asp"
  VARIANT (26)..(26): / replace = "His"
  VARIANT (34)..(34): / replace = "Asn"
  VARIANT (35)..(35): / replace = "Thr"
  VARIANT (36)..(36): / replace = "Gly"
  VARIANT (44)..(44): / replace = "Asn"
  VARIANT (49)..(49): / replace = "Arg"
DLLKHRLALLGAADKYDIVDLKEACEESLLEDIDSKNVLERLQEAWLYQL

SEQ ID NO: 548 - protein, 41 aa, Artificial sequence
  motif 12
  VARIANT (1)..(1): / replace = "Lys"
  VARIANT (5)..(5): / replace = "Leu" / replace = "Thr"
  VARIANT (6)..(6): / replace = "Ala" / replace = "Pro"
  VARIANT (12)..(12): / replace = "Lys"
  VARIANT (13)..(13): / replace = "Val"
  VARIANT (14)..(14): / replace = "Glu"
  VARIANT (16)..(16): / replace = "Phe"
  VARIANT (17)..(17): / replace = "Thr" / replace = "Ala"
  VARIANT (18)..(18): / replace = "Ala" / replace = "Pro"
  VARIANT (19)..(19): / replace = "Cys"
  VARIANT (20)..(20): / replace = "Ser"
  VARIANT (22)..(22): / replace = "Lys"
  VARIANT (23)..(23): / replace = "Arg"
  VARIANT (28)..(28): / replace = "Arg"
  VARIANT (29)..(29): / replace = "Val"
  VARIANT (31)..(31): / replace = "Leu"
  VARIANT (35)..(35): / replace = "Tyr"
  VARIANT (38)..(38): / replace = "Ile"
  VARIANT (40)..(40): / replace = "Arg"
RVETISRLAQWRIDNLGSSTYRKSDPFKIGIWNWHLSVEKN

SEQ ID NO: 549 - protein, 50 aa, Artificial sequence
  motif 13
  VARIANT (3)..(3): / replace = "Ile"
  VARIANT (4)..(4): / replace = "Ala"
  VARIANT (10)..(10): / replace = "Lys"
  VARIANT (12)..(12): / replace = "Glu"
  VARIANT (13)..(13): / replace = "Ser"
  VARIANT (14)..(14): / replace = "Leu"
  VARIANT (15)..(15): / replace = "Gly"
  VARIANT (16)..(16): / replace = "Pro"
  VARIANT (17)..(17): / replace = "Cys"
  VARIANT (18)..(18): / replace = "Thr"
  VARIANT (20)..(20): / replace = "Arg"
  VARIANT (21)..(21): / replace = "Lys"
  VARIANT (27)..(27): / replace = "Val" / replace = "Ile"
  VARIANT (33)..(33): / replace = "Tyr"
  VARIANT (36)..(36): / replace = "Val"
  VARIANT (38)..(38): / replace = "Arg"
  VARIANT (44)..(44): / replace = "Val"
  VARIANT (45)..(45): / replace = "His"
ETLSRLAQWRIDNFTASSYKRSDPFKLGIWNWHLSIEKNRYLYIRLFPEP

SEQ ID NO: 550 - protein, 50 aa, Artificial sequence
  motif 14
  VARIANT (2)..(2): / replace = "Asp"
  VARIANT (3)..(3): / replace = "Leu"
  VARIANT (22)..(22): / replace = "Asn"
  UNSURE (30)..(30): Xaa can be any naturally occurring amino acid
  VARIANT (31)..(31): / replace = "Arg"
  VARIANT (38)..(38): / replace = "Thr"
KNACEESLLEDINSGNVLERLQEAWLYQLXKLKKGCLMYLFDFGKIYDVR

SEQ ID NO: 551 - protein, 50 aa, Artificial sequence
  motif 15
  VARIANT (5)..(5): / replace = "Glu"
  VARIANT (11)..(11): / replace = "Asn"
  VARIANT (13)..(13): / replace = "Lys"
  VARIANT (19)..(19): / replace = "Ile"
  VARIANT (21)..(21): / replace = "Asp"
  VARIANT (27)..(27): / replace = "Thr" / replace = "Val"
  VARIANT (31)..(31): / replace = "Met"
  VARIANT (37)..(37): / replace = "Ile"
  VARIANT (46)..(46): / replace = "Phe"
SPVFHSMFLHDLREKESSTINIEDMSLESCTALLSYLYGTIKQEDLWKHR

SEQ ID NO: 552 - DNA, 2194 bp, Oryza sativa; identical to SEQ ID NO: 321

SEQ ID NO: 553 - DNA, 3801 bp, Artificial sequence
  expression cassette
aatccgaaaagtttctgcaccgttttcaccccctaactaacaatatagggaacgtgtgctaaatataaaatgagaccttatatatgtagcgctgataactagaactatgcaagaaaaactcatccacctactttagtggcaatcgggctaaataaaaaagagtcgctacactagtttcgttttccttagtaattaagtgggaaaatgaaatcattattgcttagaatatacgttcacatctctgtcatgaagttaaattattcgaggtagccataattgtcatcaaactcttcttgaataaaaaaatctttctagctgaactcaatgggtaaagagagagattttttttaaaaaaatagaatgaagatattctgaacgtattggcaaagatttaaacatataattatataattttatagtttgtgcattcgtcatatcgcacatcattaaggacatgtcttactccatcccaatttttatttagtaattaaagacaattgacttatttttattatttatcttttttcgattagatgcaaggtacttacgcacacactttgtgctcatgtgcatgtgtgagtgcacctcctcaatacacgttcaactagcaacacatctctaatatcactcgcctatttaatacatttaggtagcaatatctgaattcaagcactccaccatcaccagaccacttttaataatatctaaaatacaaaaaataattttacagaatagcatgaaaagtatgaaacgaactatttaggtttttcacatacaaaaaaaaaaagaattttgctcgtgcgcgagcgccaatctcccatattgggcacacaggcaacaacagagtggctgcccacagaacaacccacaaaaaacgatgatctaacggaggacagcaagtccgcaacaaccttttaacagcaggctttgcggccaggagagaggaggagaggcaaagaaaaccaagcatcctcctcctcccatctataaattcctccccccttttcccctctctatataggaggcatccaagccaagaagagggagagcaccaaggacacgcgactagcagaagccgagcgaccgccttcttcgatccatatcttccggtcgagttcttggtcgatctcttccctcctccacctcctcctcacagggtatgtgcccttcggttgttcttggatttattgttctaggttgtgtagtacgggcgttgatgttaggaaaggggatctgtatctgtgatgattcctgttcttggatttgggatagaggggttcttgatgttgcatgttatcggttcggtttgattagtagtatggttttcaatcgtctggagagctctatggaaatgaaatggtttagggtacggaatcttgcgattttgtgagtaccttttgtttgaggtaaaatcagagcaccggtgattttgcttggtgtaataaaagtacggttgtttggtcctcgattctggtagtgatgcttctcgatttgacgaagctatcctttgtttattccctattgaacaaaaataatccaactttgaagacggtcccgttgatgagattgaatgattgattcttaagcctgtccaaaatttcgcagctggcttgtttagatacagtagtccccatcacgaaattcatggaaacagttataatcctcaggaacaggggattccctgttcttccgatttgctttagtcccagaattttttttcccaaatatcttaaaaagtcactttctggttcagttcaatgaattgattgctacaaataatgcttttatagcgttatcctagctgtagttcagttaataggtaatacccctatagtttagtcaggagaagaacttatccgatttctgatctccatttttaattatatgaaatgaactgtagcataagcagtattcatttggattattttttttattagctctcaccccttcattattctgagctgaaagtctggcatgaactgtcctcaattttgttttcaaattcacatcgattatctatgcattatcctcttgtatctacctgtagaagtttctttttggttattccttgactgcttgattacagaaagaaatttatgaagctgtaatcgggatagttatactgcttgttcttatgattcatttcctttgtgcagttcttggtgtagcttgccactttcaccagcaaagttcatttaaatcaactagggatatcacaagtttgtacaaaaaagcaggcttaaacaatgacagacagcaaggtagagactctatcaaggttagctcaatggaggatcgacaatttcacagcatctacttacaaaagatctgacccttttaaaattggtatatggaactggcatctgtcaattgagaagaatcggtatttgtatattcgattgtttcctgaaccttctcggctttcgaaagagcagcttcctcctccttttgctcgctttatgcttcgtgttactacaactggaaccaatcggagacctcatatatctcctgtatatgagaggctgcttcgaacaagtgatgactttgtgtggcctattgattcttgtttacaaggtcgatttgtcattgatgttgagttccttgacctgaagatctacaccccaaatggtggagaaggaaaatctatatggcccaatgacatgattttgcaatctttagctacccaaagtactctccgatgcctctctcgcatgcttgatgagtccatccatactgatgttaccattaatacggctgatggatcagtgcaagctcacagagcgatactgtctgctacttctcctgtattccacagcatgttccttcacgatctcagggagaaagagtcctctataatcgacatagaagacatgtcaacagaatcatgcacagcgcttcttagttacttgtatggaaccataaaacaagaggatctctggaagcaccgattggcattactgggtgcggcaaacaagtatgatattgtagatttgaagaatgcttgtgaggaaagtctcctagaagacatcaactcgggtaatgtcctcgaaagactgcaagaggcctggctttaccagctaaataaattgaaaaaaggttgcttgatgtatttgttcgattttggcaagatttatgatgttagggaggaaattaacaacttcttcagacaggcagatagagatctgatgctagagatgtttcaagaagtgctcacagtttggaagcctgcctaacatgatgaggtttttgccatagttgtatacccagctttcttgtacaaagtggtgatatcacaagcccgggcggtcttctagggataacagggtaattatatccctctagatcacaagcccgggcggtcttctacgatgattgagtaataatgtgtcacgcatcaccatgggtggcagtgtcagtgtgagcaatgacctgaatgaacaattgaaatgaaaagaaaaaaagtactccatctgttccaaattaaaattcattttaaccttttaataggtttatacaataattgatatatgttttctgtatatgtctaatttgttatcatccgggcggtcttctagggataacagggtaattatatccctctagacaacacacaacaaataagagaaaaaacaaataatattaatttgagaatgaacaaaaggaccatatcattcattaactcttctccatccatttccatttcacagttcgatagcgaaaaccgaataaaaaacacagtaaattacaagcacaacaaatggtacaagaaaaacagttttcccaatgccataatactcgaac

SEQ ID NO: 554 - DNA, 56 bp, Artificial sequence
  primer: prm17159
ggggacaagtttgtacaaaaaagcaggcttaaacaatgacagacagcaaggtagag

SEQ ID NO: 555 - DNA, 50 bp, Artificial sequence
  primer: prm17160
ggggaccactttgtacaagaaagctgggtatacaactatggcaaaaacct

SEQ ID NO: 556 - protein, 328 aa, Artificial sequence
  Consensus
  misc_feature (2)..(16): Xaa can be any naturally occurring amino acid
  misc_feature (20)..(20): Xaa can be any naturally occurring amino acid
  misc_feature (28)..(29): Xaa can be any naturally occurring amino acid
  misc_feature (31)..(37): Xaa can be any naturally occurring amino acid
  misc_feature (39)..(40): Xaa can be any naturally occurring amino acid
  misc_feature (44)..(44): Xaa can be any naturally occurring amino acid
  misc_feature (46)..(46): Xaa can be any naturally occurring amino acid
  misc_feature (53)..(53): Xaa can be any naturally occurring amino acid
  misc_feature (55)..(56): Xaa can be any naturally occurring amino acid
  misc_feature (60)..(61): Xaa can be any naturally occurring amino acid
  misc_feature (63)..(64): Xaa can be any naturally occurring amino acid
  misc_feature (68)..(68): Xaa can be any naturally occurring amino acid
  misc_feature (71)..(72): Xaa can be any naturally occurring amino acid
  misc_feature (78)..(79): Xaa can be any naturally occurring amino acid
  misc_feature (81)..(82): Xaa can be any naturally occurring amino acid
  misc_feature (85)..(112): Xaa can be any naturally occurring amino acid
  misc_feature (114)..(116): Xaa can be any naturally occurring amino acid
  misc_feature (118)..(193): Xaa can be any naturally occurring amino acid
  misc_feature (195)..(197): Xaa can be any naturally occurring amino acid
  misc_feature (221)..(221): Xaa can be any naturally occurring amino acid
  misc_feature (223)..(223): Xaa can be any naturally occurring amino acid
  misc_feature (238)..(238): Xaa can be any naturally occurring amino acid
  misc_feature (249)..(249): Xaa can be any naturally occurring amino acid
  misc_feature (252)..(252): Xaa can be any naturally occurring amino acid
  misc_feature (257)..(257): Xaa can be any naturally occurring amino acid
  misc_feature (264)..(264): Xaa can be any naturally occurring amino acid
  misc_feature (267)..(267): Xaa can be any naturally occurring amino acid
  misc_feature (295)..(295): Xaa can be any naturally occurring amino acid
  misc_feature (304)..(304): Xaa can be any naturally occurring amino acid
  misc_feature (313)..(313): Xaa can be any naturally occurring amino acid
  misc_feature (316)..(316): Xaa can be any naturally occurring amino acid
  misc_feature (318)..(318): Xaa can be any naturally occurring amino acid
  misc_feature (320)..(320): Xaa can be any naturally occurring amino acid
MXXXXXXXXXXXXXXXRFTXAEVAEMEXXLXXXXXXXVXXREVXQXLAEKFSXSXXRAGXXKXXVQWXQVXXWFQNRXXAXXAKXXXXXXXXXXXXXXXXXXXXXXXXXXXXKXXXSXXXXXXXXXXXXXXXXXXXXXXXXXXXXXXXXXXXXXXXXXXXXXXXXXXXXXXXXXXXXXXXXXXXXXXXXXXXXEXXXLEFEAKSARDGAWYDVAAFLSHRXLXSGEPEVRVRFAGFGXEEDEWVNVRKXVRXRSLPXESSECVXVLXGDLVLCFQEGKDQALYFDAHVLDIQRRXHDIRGCRCXFLVRYDHDXSEXEXVXLRKICRRP
